(19) United States
(12) Patent Application Publication
(10) Pub. No.: US 2025/0188456 A1
(43) Pub. Date: Jun. 12, 2025

(54) HIGH MOBILITY GROUP BOX-1 (HMGB1) IRNA COMPOSITIONS AND METHODS OF USE THEREOF

(71) Applicant: Alnylam Pharmaceuticals, Inc., Cambridge, MA (US)

(72) Inventors: Gregory Hinkle, Plymouth, MA (US); Frederic Tremblay, Boston, MA (US); James D. McIninch, Burlington, MA (US)

(21) Appl. No.: 18/768,261

(22) Filed: Jul. 10, 2024

Related U.S. Application Data
(63) Continuation of application No. 16/954,625, filed on Jun. 17, 2020, now abandoned.
(60) Provisional application No. 62/599,860, filed on Dec. 18, 2017.

(51) Int. Cl. C12N 15/113

(52) U.S. Cl. CPC C12N 15/113; C12N 2310/14; C12N 2310/312; C12N 2310/315; C12N 2310/3183; C12N 2310/345; C12N 2310/346; C12N 2310/351; C12N 2310/3521; C12N 2310/3533; C12N 2330/30

(57) ABSTRACT

RNAi agents, e.g., double stranded RNA (dsRNA) agents, targeting the HMGB1 gene, useful for inhibiting expression of a HMGB1 gene and preventing and treating an HMGB1-associated disorder, e.g., metabolic disorder or non-alcoholic fatty liver disease, e.g., non-alcoholic steatohepatitis (NASH).

### RELATED APPLICATIONS

[0001] This application is a continuation of U.S. patent application Ser. No. 16/954,625, filed on Jun. 17, 2020, which is a 35 U.S.C. § 371 national stage filing of International Application No.: PCT/US2018/066126, filed on Dec. 18, 2018, which in turn claims the benefit of priority to U.S. Provisional Patent Application No. 62/599,860, filed on Dec. 18, 2017. The entire contents of each of the foregoing applications are hereby incorporated herein by reference.

### SEQUENCE LISTING

[0002] The instant application contains a Sequence Listing which has been submitted electronically in XML format and is hereby incorporated by reference in its entirety. Said XML copy, created on Jan. 17, 2025, is named 121301-08003_SL.xml and is 3,458,625 bytes in size.

### BACKGROUND OF THE INVENTION

[0003] Metabolic syndrome is a leading cause of mortality and morbidity in industrialized countries and non-alcoholic fatty liver disease (NAFLD) is the most common hepatic disease in developed countries estimated to affect one in three adults in the United States. Its prevalence in children is also increasing in parallel with childhood obesity.

[0004] NAFLD includes the entire spectrum of fatty liver disease (FLD) affecting subjects who drink little to no alcohol. As the name implies, the main characteristic of nonalcoholic fatty liver disease is too much fat stored in liver cells. The severity of NAFLD is varied and can range from simple hepatic steatosis or non-alcoholic fatty liver (NAFL) to nonalcoholic steatohepatitis (NASH), a progressive condition that may lead to cirrhosis, hepatocellular cancer or liver failure. NAFLD is commonly associated with metabolic syndrome, a combination of multiple disorders including insulin resistance, abdominal obesity, dyslipidemia, increased blood pressure, hypercholesterolemia, and a pro-inflammatory state, and is considered to be the hepatic manifestation of metabolic syndrome. As with obesity and insulin resistance, NAFLD has been associated with chronic inflammation. In addition to NAFLD, other insults including, but not limited to, hepatic infection, hepatic inflammation, cirrhosis, autoimmune hepatitis, chronic alcohol consumption optionally in association with one or more of fatty liver and elevated serum lipids or cholesterol; hemochromatosis, and chronic use of pharmaceutical agents that cause liver damage have been associated with chronic liver inflammation and liver fibrosis.

[0005] Liver inflammation and fibrosis, as a result of NAFLD, metabolic syndrome, and other insults can lead to liver necrosis which results in the release of high mobility group box-1 (HMGB1) protein in passive release from hepatocytes which, in turn, promotes recruitment and activation of inflammatory cells, including neutrophils. HMGB1 can also be secreted actively via a non-canonical secretory pathway in response to cell stress or inflammation. The inflammation response can cause further cell damage and promote fibrosis.

[0006] Current treatments for NAFLD and metabolic sysndrome are primarily life-style changes which are often ineffective. Accordingly, there is a need in the art for compositions and methods for the treatment of NAFLD and related disorders.

### SUMMARY OF THE INVENTION

[0007] The present invention provides iRNA compositions which affect the RNA-induced silencing complex (RISC)-mediated cleavage of RNA transcripts of a gene encoding high mobility group box-1 (HMGB1). The HMGB1 may be within a cell, e.g., a cell within a subject, such as a human.

[0008] In an aspect, the invention provides a double stranded ribonucleic acid (dsRNA) agent for inhibiting expression of HMGB1, wherein the dsRNA agent comprises a sense strand and an antisense strand, wherein the sense strand comprises at least 15 contiguous nucleotides differing by no more than 3 nucleotides from the nucleotide sequence of SEQ ID NO: 1 and the antisense strand comprises at least 15 contiguous nucleotides differing by no more than 3 nucleotides from the nucleotide sequence of SEQ ID NO:2.

[0009] In certain embodiments, the sense strands and antisense strands comprise sequences selected from any one of the sequences provided in any one of Tables 3, 5, 6, or 7.

[0010] In an aspect, the invention provides a double stranded ribonucleic acid (dsRNA) agent for inhibiting expression of HMGB1, wherein the dsRNA agent comprises a sense strand and an antisense strand, the antisense strand comprising a region of complementarity which comprises at least 15 contiguous nucleotides differing by no more than 3 nucleotides from any one of the antisense nucleotide sequences listed in any one of Tables 3, 5, 6, or 7.

[0011] In certain embodiments, the dsRNA agent comprises at least one modified nucleotide. In some embodiments, all of the nucleotides of the sense strand and all of the nucleotides of the antisense strand comprise a modification.

[0012] In an aspect, the invention provides a double stranded RNA agent for inhibiting expression of HMGB1, wherein the dsRNA agent comprises a sense strand and an antisense strand forming a double stranded region, wherein the sense strand comprises at least 15 contiguous nucleotides differing by no more than 3 nucleotides from the nucleotide sequence of SEQ ID NO:1 and the antisense strand comprises at least 15 contiguous nucleotides differing by no more than 3 nucleotides from the nucleotide sequence of SEQ ID NO: 2, wherein substantially all of the nucleotides of the sense strand and substantially all of the nucleotides of the antisense strand are modified nucleotides, and wherein the sense strand is conjugated to a ligand attached at the 3′-terminus.

[0013] In an embodiment, the present invention provides double stranded RNA agents for inhibiting expression of HMGB1, which comprise a sense strand and an antisense strand forming a double stranded region, wherein the sense strand comprises at least 15 contiguous nucleotides differing by no more than 3 nucleotides from any of nucleotides 830-851, 830-850, 831-851, 917-937, 944-997, 944-990, 944-964, 968-997, 968-990, 968-995, 968-988, 969-989,970-990, 971-991, 972-992, 972-995, 973-993, 974-994, 975-995, 976-996, 977-997, 1019-1039, 1158-1194, 1158-1182, 1158-1178, 1159-1179, 1160-1180, 1161-1181, 1162-1182, or 1174-1194 of SEQ ID NO:1 and the antisense strand comprises at least 15 contiguous nucleotides differing by no more than 3 nucleotides from the corresponding position of the nucleotide sequence of SEQ ID NO:2 such that the antisense strand is complementary to the at least 15 contiguous nucleotides differing by no more than 3 nucleotides in the sense strand. In certain embodiments, substantially all of the nucleotides of the sense strand are modified nucleotides. In certain embodiments, substantially all of the nucleotides of the antisense strand are modified nucleotides. In certain embodiments, substantially all of the nucleotides of both strands are modified. In some embodiments, the sense strand is conjugated to a ligand attached at the 3′-terminus.

[0014] In an aspect, the present invention also provides dsRNA agents for inhibiting expression of HMGB1, which comprise a sense strand and an antisense strand forming a double stranded region, wherein the sense strand comprises at least 15 contiguous nucleotides from any of nucleotides 830-851, 830-850, 831-851, 917-937, 944-997, 944-990, 944-964, 968-997, 968-990, 968-995, 968-988, 969-989,970-990, 971-991, 972-992, 972-995, 973-993, 974-994, 975-995, 976-996, 977-997, 1158-1194, 1019-1039, 1158-1182, 1158-1178, 1159-1179, 1160-1180, 1161-1181, 1162-1182, or 1174-1194 of SEQ ID NO: 1 and the antisense strand comprises at least 15 contiguous nucleotides from the corresponding position of the nucleotide sequence of SEQ ID NO:2 such that the antisense strand is complementary to the at least 15 contiguous nucleotides in the sense strand.

[0015] In certain embodiments, the sense strand comprises at least 15 contiguous nucleotides of the nucleotide sequence 5′-UAAGUUGGUUCUAGCGCAGUU-3′ (SEQ ID NO: 511) and the antisense strand comprises at least 15 contiguous nucleotides of the nucleotide sequence 5′-AACUGCGCUAGAACCAACUUAUU-3′ (SEQ ID NO:512). In certain embodiments, the sense strand comprises at least 17 contiguous nucleotides of the nucleotide sequence 5′-UAAGUUGGUUCUAGCGCAGUU-3′ (SEQ ID NO:511) and the antisense strand comprises at least 17 contiguous nucleotides of the nucleotide sequence 5′-AACUGCGCUAGAACCAACUUAUU-3′ (SEQ ID NO:512). In certain embodiments, the sense strand comprises at least 19 contiguous nucleotides of the nucleotide sequence 5′-UAAGUUGGUUCUAGCGCAGUU-3′ (SEQ ID NO:511) and the antisense strand comprises at least 19 contiguous nucleotides of the nucleotide sequence 5′-AACUGCGCUAGAACCAACUUAUU-3′ (SEQ ID NO:512). In certain embodiments, the sense strand comprises the 21 contiguous nucleotides of the nucleotide sequence 5′-UAAGUUGGUUCUAGCGCAGUU-3′ (SEQ ID NO:511) and the antisense strand comprises at least 21 contiguous nucleotides of the nucleotide sequence 5′-AACUGCGCUAGAACCAACUUAUU-3′ (SEQ ID NO:512).

[0016] In certain embodiments, the sense strand comprises at least 15 contiguous nucleotides of the nucleotide sequence 5′-AAGUUGGUUCUAGCGCAGUUU-3′ (SEQ ID NO: 513) and the antisense strand comprises at least 15 contiguous nucleotides of the nucleotide sequence 5′-AAACUGCGCUAGAACCAACUUAU-3′ (SEQ ID NO:514). In certain embodiments, the sense strand comprises at least 17 contiguous nucleotides of the nucleotide sequence 5′-AAGUUGGUUCUAGCGCAGUUU-3′ (SEQ ID NO:513) and the antisense strand comprises at least 17 contiguous nucleotides of the nucleotide sequence 5′-AAACUGCGCUAGAACCAACUUAU-3′ (SEQ ID NO:514). In certain embodiments, the sense strand comprises at least 19 contiguous nucleotides of the nucleotide sequence 5′-AAGUUGGUUCUAGCGCAGUUU-3′ (SEQ ID NO:513) and the antisense strand comprises at least 19 contiguous nucleotides of the nucleotide sequence 5′-AAACUGCGCUAGAACCAACUUAU-3′ (SEQ ID NO:514). In certain embodiments, the sense strand comprises the 21 contiguous nucleotides of the nucleotide sequence 5′-AAGUUGGUUCUAGCGCAGUUU-3′ (SEQ ID NO:513) and the antisense strand comprises at least 21 contiguous nucleotides of the nucleotide sequence 5′-AAACUGCGCUAGAACCAACUUAU-3′ (SEQ ID NO:514).

[0017] In certain embodiments, substantially all of the nucleotides of the sense strand are modified nucleotides. In certain embodiments, substantially all of the nucleotides of the antisense strand are modified nucleotides. In certain embodiments, substantially all of the nucleotides of both strands are modified. In some embodiments, the sense strand is conjugated to a ligand attached at the 3′-terminus.

[0018] In certain embodiments, the antisense strand comprises a region of complementarity which comprises at least 15 contiguous nucleotides differing by no more than 3 nucleotides from any one of the antisense sequences listed in any one of Tables 3, 5, 6, or 7. For example, in a certain embodiment, the antisense strand comprises a region of complementarity which comprises at least 15 contiguous nucleotides differing by no more than 3 nucleotides from any one of the antisense sequences of a duplex selected from the group consisting of AD-245281, AD-245282, AD-245305, AD-245336, AD-245339, AD-245383, AD-245472, AD-193177, AD-193312, AD-193168, AD-193313, AD-193180, AD-193182, AD-193314, AD-193173, AD-193311, AD-193179, AD-193178, AD-193174, AD-193315, AD-193175, AD-193326, AD-193176, AD-19318, AD-80651, or AD-80652. In certain embodiment, the antisense strand comprises a region of complementarity which comprises at least 15 contiguous nucleotides of any one of the antisense nucleotide sequences of one of any one of the foregoing duplexes.

[0019] In some embodiments, all of the nucleotides of the sense strand and all of the nucleotides of the antisense strand comprise a modification. In one embodiment, at least one of the modified nucleotides is selected from the group consisting of a deoxy-nucleotide, a 3′-terminal deoxy-thymine (dT) nucleotide, a 2′-O-methyl modified nucleotide, a 2′-fluoro modified nucleotide, a 2′-deoxy-modified nucleotide, a locked nucleotide, an unlocked nucleotide, a conformationally restricted nucleotide, a constrained ethyl nucleotide, an abasic nucleotide, a 2′-amino-modified nucleotide, a 2′-O-allyl-modified nucleotide, 2′-C-alkyl-modified nucleotide, 2′-hydroxly-modified nucleotide, a 2′-methoxyethyl modified nucleotide, a 2′-O-alkyl-modified nucleotide, a morpholino nucleotide, a phosphoramidate, a non-natural base comprising nucleotide, a tetrahydropyran modified nucleotide, a 1,5-anhydrohexitol modified nucleotide, a cyclohexenyl modified nucleotide, a nucleotide comprising a phosphorothioate group, a nucleotide comprising a methylphosphonate group, a nucleotide comprising a 5′-phosphate, a nucleotide comprising a 5′-phosphate mimic, a glycol modified nucleotide (GNA), and a 2-O—(N-methylacetamide) modified nucleotide; and combinations thereof.

[0020] In certain embodiments, substantially all of the nucleotides of the sense strand are modified. In certain embodiments, substantially all of the nucleotides of the antisense strand are modified. In certain embodiments, substantially all of the nucleotides of both the sense strand and the antisense strand are modified.

[0021] In certain embodiments, the duplex comprises a modified antisense strand selected from the group of antisense sequences provided in any one of Tables 5, 6, or 7. In certain embodiments, the duplex comprises a modified sense strand selected from the group of sense sequence provided in any one of Tables 5, 6, or 7. In certain embodiments, the duplex comprises a modified duplex selected from the group of duplexes provided in any one of Tables 5, 6, or 7. In certain embodiments, the duplex is selected from the group consisting of AD-245281, AD-245282, AD-245305, AD-245336, AD-245339, AD-245383, AD-245472, AD-193177, AD-193312, AD-193168, AD-193313, AD-193180, AD-193182, AD-193314, AD-193173, AD-193311, AD-193179, AD-193178, AD-193174, AD-193315, AD-193175, AD-193326, AD-193176, AD-19318, AD-80651, or AD-80652.

[0022] In certain embodiments, the sense strand comprises a modified sequence of 5′-usasaguuGfgUfUfCfuagcgcaguu-3′ (SEQ ID NO:525) and the antisense strand comprises a modified sequence of 5′-asAfscugc (Ggn) cuagaaCfcAfacuuasusu-3′ (SEQ SQE ID NO: 526), wherein a is 2′-O-methyladenosine-3′-phosphate, c is 2′-O-methylcytidine-3′-phosphate, g is 2′-O-methylguanosine-3′-phosphate, u is 2′-O-methyluridine-3′-phosphate, Af is 2′-fluoroadenosine-3′-phosphate, Cf is 2′-fluorocytidine-3′-phosphate, Gf is 2′-fluoroguanosine-3′-phosphate, Uf is 2′-fluorouridine-3′-phosphate, (Ggn) is guanosine-glycol nucleic acid (GNA), and s is phosphorothioate linkage; and wherein the 3′end of the sense strand is optionally covalently linked to a ligand, e.g., an N-[tris(GalNAc-alkyl)-amidodecanoyl)]-4-hydroxyprolinol (also referred to as Hyp-(GalNAc-alkyl) 3 or L96).

[0023] In certain embodiments, the sense strand comprises a modified sequence of 5′-asasguugGfuUfCfUfagcgcaguuu-3′ (SEQ ID NO:527) and the antisense strand comprises a modified sequence of 5′-asAfsacug (Cgn) gcuagaAfcCfaacuusasu-3′ (SEQ SQE SQE ID NO: 528), wherein a is 2′-O-methyladenosine-3′-phosphate, c is 2′-O-methylcytidine-3′-phosphate, g is 2′-O-methylguanosine-3′-phosphate, u is 2′-O-methyluridine-3′-phosphate, Af is 2′-fluoroadenosine-3′-phosphate, Cf is 2′-fluorocytidine-3′-phosphate, Gf is 2′-fluoroguanosine-3′-phosphate, Uf is 2′-fluorouridine-3′-phosphate, (Cgn) is cytidine-glycol nucleic acid (GNA), and s is phosphorothioate linkage; and wherein the 3′end of the sense strand is optionally covalently linked to a ligand, e.g., an N-[tris(GalNAc-alkyl)-amidodecanoyl)]-4-hydroxyprolinol (also referred to as Hyp-(GalNAc-alkyl) 3 or L96).

[0024] In certain embodiments, the region of complementarity between the antisense strand and the target is at least 17 nucleotides in length. For example, the region of complementarity between the antisense strand and the target is 19 to 21 nucleotides in length, for example, the region of complementarity is 21 nucleotides in length. In preferred embodiments, each strand is no more than 30 nucleotides in length. In one embodiment, each strand is independently 21 to 23 nucleotides in length.

[0025] In some embodiments, at least one strand comprises a 3′ overhang of at least 1 nucleotide, e.g., at least one strand comprises a 3′ overhang of at least 2 nucleotides.

[0026] In many embodiments, the dsRNA agent further comprises a ligand. The ligand can be conjugated to the 3′ end of the sense strand of the dsRNA agent. The ligand can be an N-acetylgalactosamine (GalNAc) derivative including, but not limited to

[chemical structure]

[0027] An exemplary dsRNA agent conjugated to the ligand as shown in the following schematic:

[chemical structure]

and, wherein X is O or S. In one embodiment, the X is O.

[0028] In certain embodiments, the region of complementarity comprises one of the antisense sequences in any one of Tables 3, 5, 6, or 7. In other embodiments, the region of complementarity consists of one of the antisense sequences in any one of Tables 3, 5, 6, or 7. In certain embodiments, the antisense strand is from a duplex selected from the group consisting of AD-245281, AD-245282, AD-245305, AD-245336, AD-245339, AD-245383, AD-245472, AD-193177, AD-193312, AD-193168, AD-193313, AD-193180, AD-193182, AD-193314, AD-193173, AD-193311, AD-193179, AD-193178, AD-193174, AD-193315, AD-193175, AD-193326, AD-193176, AD-19318, AD-80651, and AD-80652.

[0029] In an aspect, the invention provides a double stranded RNA (dsRNA) agent for inhibiting expression of HMGB1, wherein the dsRNA agent comprises a sense strand and an antisense strand forming a double stranded region, wherein the sense strand comprises at least 15 contiguous nucleotides differing by no more than 3 nucleotides from the nucleotide sequence of SEQ ID NO:1 and the antisense strand comprises at least 15 contiguous nucleotides differing by no more than 3 nucleotides from the nucleotide sequence of SEQ ID NO: 2, wherein substantially all of the nucleotides of the sense strand comprise a modification selected from a 2′-O-methyl modification and a 2′-fluoro modification, wherein the sense strand comprises two phosphorothioate internucleotide linkages at the 5′-terminus, wherein substantially all of the nucleotides of the antisense strand comprise a modification selected from a 2′-O-methyl modification and a 2′-fluoro modification, wherein the antisense strand comprises two phosphorothioate internucleotide linkages at the 5′-terminus and two phosphorothioate internucleotide linkages at the 3′-terminus, and wherein the sense strand is conjugated to one or more GalNAc derivatives attached through a monovalent, a bivalent, or a trivalent branched linker at the 3′-terminus. In certain embodiments, the modifications further include a GNA modification. In certain embodiments, the GNA modification is at a site opposite to the seed region of the antisense strand at positions 2-8 of the 5′-end of the antisense strand.

[0030] In certain embodiments, the sense strand comprises at least 15 contiguous nucleotides of any of nucleotides 830-851, 830-850, 831-851, 917-937, 944-997, 944-990, 944-964, 968-997, 968-990, 968-995, 968-988, 969-989,970-990, 971-991, 972-992, 972-995, 973-993, 974-994, 975-995, 976-996, 977-997, 1158-1194, 1019-1039, 1158-1182, 1158-1178, 1159-1179, 1160-1180, 1161-1181, 1162-1182, or 1174-1194 of SEQ ID NO:1 and the antisense strand comprises at least 15 contiguous nucleotides from the corresponding position of the nucleotide sequence of SEQ ID NO:2 such that the antisense strand is complementary to the at least 15 contiguous nucleotides in the sense strand, wherein substantially all of the nucleotides of the sense strand comprise a modification selected from a 2′-O-methyl modification and a 2′-fluoro modification, wherein the sense strand comprises two phosphorothioate internucleotide linkages at the 5′-terminus, wherein substantially all of the nucleotides of the antisense strand comprise a modification selected from a 2′-O-methyl modification and a 2′-fluoro modification, wherein the antisense strand comprises two phosphorothioate internucleotide linkages at the 5′-terminus and two phosphorothioate internucleotide linkages at the 3′-terminus, and wherein the sense strand is conjugated to one or more GalNAc derivatives attached through a monovalent, a bivalent, or a trivalent branched linker at the 3′-terminus. In certain embodiments, the modifications further include a GNA modification.

[0031] In certain embodiments, all of the nucleotides of the sense strand and all of the nucleotides of the antisense strand are modified nucleotides. In certain embodiments, each strand independently has 19-30 nucleotides. In certain embodiments, each strand has 14-40 nucleotides.

[0032] In certain embodiments, substantially all of the nucleotides of the sense strand are modified. In certain embodiments, substantially all of the nucleotides of the antisense strand are modified. In certain embodiments, substantially all of the nucleotides of both the sense strand and the antisense strand are modified.

[0033] In certain embodiments, the sense strand comprises a thermally destabilizing nucleotide placed at a site opposite to the seed region of the antisense strand at positions 2-8 of the 5′-end of the antisense strand. In certain embodiments, the thermally destabilizing modification is selected from an abasic modification; a mismatch with the opposing nucleotide in the duplex; and destabilizing sugar modification such as 2′-deoxy modification or acyclic nucleotide such as unlocked nucleic acids (UNA) or glycerol nucleic acid (GNA). In certain embodiments, the destabilizing sugar modification is GNA.

[0034] In an aspect, the invention provides a cell containing the dsRNA agent as described herein.

[0035] In an aspect, the invention provides a vector encoding at least one strand of a dsRNA agent, wherein the dsRNA agent comprises a region of complementarity to at least a part of an mRNA encoding HMGB1, wherein the dsRNA is 30 base pairs or less in length, and wherein the dsRNA agent targets the mRNA for cleavage. In certain embodiments, the region of complementarity is at least 15 nucleotides in length. In certain embodiments, the region of complementarity is 19 to 23 nucleotides in length.

[0036] In an aspect, the invention provides a pharmaceutical composition for inhibiting expression of an HMGB1 gene comprising a dsRNA agent of the invention.

[0037] In an aspect, the invention provides a pharmaceutical composition comprising the double stranded RNA agent of the invention and a lipid formulation. In certain embodiments, the lipid formulation comprises a LNP. In certain embodiments, the lipid formulation comprises a MC3.

[0038] In an aspect, the invention provides a method of inhibiting HMGB1 expression in a cell, the method comprising (a) contacting the cell with the double stranded RNA agent of the invention or a pharmaceutical composition of the invention; and (b) maintaining the cell produced in step (a) for a time sufficient to obtain degradation of the mRNA transcript of a HMGB1 gene, thereby inhibiting expression of the HMGB1 gene in the cell. In certain embodiments, the cell is within a subject, for example, a human subject, for example a female human or a male human. In preferred embodiments, HMGB1 expression is inhibited by at least 30%, 40%, 50%, 60%, 70%, 80%, 90%, 95%, or to below the threshold of detection within the cell. In certain embodiments, reduction of expression of HMGB1 is detected in a subject by measuring the level of HMGB1 in a blood or serum sample from the subject. In certain embodiments, reduction of expression of HMGB1 is detected in a subject by measuring the level of HMGB1 in a urine sample from the subject. In preferred embodiments, the HMGB1 level in the subject sample is reduced by at least 30%, 40%, preferably at least 50%, 60%, 70%, 80%, 90%, or 95%. In certain embodiments, HMGB1 protein is detected. In certain embodiments, HMGB1 RNA is detected, e.g., circulating RNA present in vesicular structures. In certain embodiments, the HMGB1 RNA is assayed for site specific cleavage. In certain embodiments, the subject is suffering from an HMGB1-associated disorder. In certain embodiments, the subject meets at least one diagnostic criterion for metabolic disorder. In certain embodiments, the subject has been diagnosed with metabolic disorder. In certain embodiments, the subject has been diagnosed with NAFLD. In certain embodiments, the subject has been diagnosed with NASH.

[0039] In an aspect, the invention provides a method of treating an HMGB1-associated disorder. In certain embodiments, the HMGB1-associated disorder is selected from liver inflammation, liver fibrosis, liver damage associated with an elevated level of HMGB1, metabolic disorder, blood pressure equal to or higher than 130/85 mmHg, large waist circumference (40 inches or more for men and 35 inches or more for women); waist-to-hip ratio<1.0 (for men) or <0.8 (for women); low HDL cholesterol (under 40 mg/dL for men and under 50 mg/dL for women), triglycerides of at least 150 mg/dL, NAFLD, steatohepatitis, NASH, NASH cirrhosis, cryptogenic cirrhosis, hypertension, hypercholesterolemia, hepatic infection, hepatic inflammation, cirrhosis, autoimmune hepatitis, chronic alcohol consumption, alcoholic hepatitis, alcoholic steatohepatitis, hemochromatosis, and chronic use of pharmaceutical agents that cause liver damage. In an aspect, the invention provides a method of treating metabolic disorder. In an aspect, the invention provides a method of treating NAFLD. In an aspect, the invention provides a method of treating NASH.

[0040] In an aspect, the invention provides a method of preventing the development of an HMGB1-associated disorder in a subject at risk of developing an HMGB1-associated disorder. In an aspect, the invention provides a method of preventing the development of NASH in a subject at risk of developing NASH, e.g. a subject at risk of developing or diagnosed with NAFLD or metabolic disorder.

[0041] In preferred embodiments, the subject diagnosed with or at risk of developing an HMGB1-associated disorder is human. In certain embodiments, the subject has at least one sign of metabolic disorder selected from elevated fasting blood glucose of at least 100 mg/dL, blood pressure equal to or higher than 130/85 mmHg, large waist circumference wherein a large waist circumference is 40 inches or more for men and 35 inches or more for women; low HDL cholesterol wherein low LDH cholesterol is under 40 mg/dL for men and under 50 mg/dL for women; triglycerides equal to or higher than 150 mg/dL. In certain embodiments, the subject has an Hb1Ac of at least 6.5%, type 2 diabetes mellitus, or 2 hour postprandial blood glucose or serum glucose concentration of at least 140 mg/dl. In certain embodiments, the subject is obese. In certain embodiments, the subject has type 2 diabetes mellitus. In certain embodiments, the subject has fatty liver disease (FLD). In certain embodiments, the subject has a NAFLD, e.g., steatohepatitis, NASH, NASH cirrhosis, cryptogenic cirrhosis, or hemochromatosis. In certain embodiments, the subject suffers from liver inflammation or fibrosis. In certain embodiments, the subject suffers from a hepatic infection, cirrhosis, or autoimmune hepatitis. In certain embodiments, the subject has exhibited chronic excessive alcohol consumption. In certain embodiments, the subject has alcoholic hepatitis or alcoholic steatohepatitis. In certain embodiments, the subject is a female human. In certain embodiments, the subject is a male human.

[0042] In certain embodiments, the subject with an HMGB1-associated disorder is at risk of developing NAFLD. In certain embodiments, the subject at risk of developing NAFLD is obese. In certain embodiments, the subject at risk of developing NAFLD has at least one sign of metabolic disorder selected from elevated fasting blood glucose of at least 100 mg/dL, blood pressure equal to or higher than 130/85 mmHg, large waist circumference wherein a large waist circumference is 40 inches or more for men and 35 inches or more for women; low HDL cholesterol wherein low LDH cholesterol is under 40 mg/dL for men and under 50 mg/dL for women; triglycerides equal to or higher than 150 mg/dL. In certain embodiments, the subject at risk of developing NAFLD has an Hb1Ac of at least 6.5%, type 2 diabetes mellitus, or 2 hour postprandial blood glucose or serum glucose concentration of at least 140 mg/dl. In certain embodiments, the subject at risk of developing NAFLD has a condition with an established association to NAFLD such as obesity, type 2 diabetes mellitus, dyslipidemia, and polycystic ovarian disease. In certain embodiments, the subject has a condition associated with NAFLD such as hypothyroidism, obstructive sleep apnea, hypopituitarism, hypogonadism, pancreatoduodenal resection, and psoriasis. In certain embodiments, the subject has a NAFLD. In certain embodiments, the subject is a female human. In certain embodiments, the subject is a male human.

[0043] In certain embodiments, the dsRNA agent is administered at a dose of about 0.01 mg/kg to about 50 mg/kg. In certain embodiments, the dsRNA agent is administered to the subject subcutaneously.

[0044] In certain embodiments, the methods of the invention further comprise monitoring the subject for changes in one or more diagnostic markers of an HMGB1-associated disorder, e.g., NAFLD or metabolic disorder. In certain embodiments, the method further includes measuring level of HMGB1 in the subject, e.g., level of HMGB1 protein or RNA in a subject blood or serum sample or in a subject urine sample. In certain embodiments, the subject has undergone a test for HbAlc level, pre-prandial blood glucose, post-prandial blood glucose, insulin sensitivity, or glucose sensitivity test, a blood pressure test, a cholesterol test, or a serum lipid test; or weight and height determination or a waist circumference determination.

[0045] In certain embodiments, the subject has been administered an additional agent or subject to an intervention for the treatment of metabolic disorder, e.g., an additional agent for the treatment of high blood pressure or type 2 diabetes, or gastric bypass surgery.

[0046] In various embodiments, the dsRNA agent is administered at a dose of about 0.01 mg/kg to about 10 mg/kg or about 0.5 mg/kg to about 50 mg/kg. In some embodiments, the dsRNA agent is administered at a dose of about 10 mg/kg to about 30 mg/kg. In certain embodiments, the dsRNA agent is administered at a dose selected from the group consisting of 0.5 mg/kg, 1 mg/kg, 1.5 mg/kg, 3 mg/kg, 5 mg/kg, 10 mg/kg, and 30 mg/kg. In certain embodiments, the RNAi agent is administered about once per month, about once every other two months, about once a quarter (i.e., once every three months), or about once every six months at a dose of about 0.1 mg/kg to about 5.0 mg/kg. In certain embodiments, the dsRNA agent is administered no more than about once per month.

[0047] In certain embodiments, the dsRNA agent is administered to the subject once a month. In certain embodiments, the dsRNA agent is administered to the subject once every three months. In certain embodiments, the dsRNA agent is administered once every three to six months. In certain embodiments, the RNA agent is administered no more than once per month.

[0048] In some embodiments, the dsRNA agent is administered to the subject subcutaneously.

[0049] In certain embodiments, the level of HMGB1 is measured in the subject. In certain embodiments, the level of HMGB1 is the level of HMGB1 protein in a subject blood or serum sample, or the level of HMGB1 RNA in a blood or urine sample. In certain embodiments, the RNA in the blood or urine sample is assayed for an siRNA cleavage site.

### DETAILED DESCRIPTION OF THE INVENTION

[0050] The present invention provides iRNA compositions which effect the RNA-induced silencing complex (RISC)-mediated cleavage of RNA transcripts of an HMGB1 gene. The gene may be within a cell, e.g., a cell within a subject, such as a human. The use of these iRNAs enables the targeted degradation of mRNAs of the corresponding gene (HMGB1 gene) in mammals.

[0051] The iRNAs of the invention have been designed to target the human HMGB1 gene, including portions of the gene that are conserved in the HMGB1 orthologs of other mammalian species. Without intending to be limited by theory, it is believed that a combination or sub-combination of the foregoing properties and the specific target sites or the specific modifications in these iRNAs confer to the iRNAs of the invention improved efficacy, stability, potency, durability, and safety.

[0052] Accordingly, the present invention provides methods for treating and preventing an HMGB1-associated disorder, e.g., NAFLD or metabolic disorder, using iRNA compositions which effect the RNA-induced silencing complex (RISC)-mediated cleavage of RNA transcripts of an HMGB1 gene.

[0053] The iRNAs of the invention include an RNA strand (the antisense strand) having a region which is about 30 nucleotides or less in length, e.g., 15-30, 15-29, 15-28, 15-27, 15-26, 15-25, 15-24, 15-23, 15-22, 15-21, 15-20, 15-19, 15-18, 15-17, 18-30, 18-29, 18-28, 18-27, 18-26, 18-25, 18-24, 18-23, 18-22, 18-21, 18-20, 19-30, 19-29, 19-28, 19-27, 19-26, 19-25, 19-24, 19-23, 19-22, 19-21, 19-20, 20-30, 20-29, 20-28, 20-27, 20-26, 20-25, 20-24,20-23, 20-22, 20-21, 21-30, 21-29, 21-28, 21-27, 21-26, 21-25, 21-24, 21-23, or 21-22 nucleotides in length, preferably 19-21 nucleotides in length, which region is substantially complementary to at least part of an mRNA transcript of an HMGB1 gene.

[0054] In certain embodiments, one or both of the strands of the double stranded RNAi agents of the invention is up to 66 nucleotides in length, e.g., 36-66, 26-36, 25-36, 31-60, 22-43, 27-53 nucleotides in length, with a region of at least 19 contiguous nucleotides that is substantially complementary to at least a part of an mRNA transcript of an HMGB1 gene.

[0055] In some embodiments, such iRNA agents having longer length antisense strands preferably may include a second RNA strand (the sense strand) of 20-60 nucleotides in length wherein the sense and antisense strands form a duplex of 18-30 contiguous nucleotides.

[0056] In some embodiments, one or both of the strands of the double stranded RNAi agents of the invention is up to 66 nucleotides in length, e.g., 36-66, 26-36, 25-36, 31-60, 22-43, 27-53 nucleotides in length, with a region of at least 19 contiguous nucleotides that is substantially complementary to at least a part of an mRNA transcript of an HMGB1 gene. In some embodiments, such iRNA agents having longer length antisense strands may include a second RNA strand (the sense strand) of 20-60 nucleotides in length wherein the sense and antisense strands form a duplex of 18-30 contiguous nucleotides.

[0057] The use of iRNAs of the invention enables the targeted degradation of mRNAs of the corresponding gene (HMGB1 gene) in mammals. Using in vitro and in vivo assays, the present inventors have demonstrated that iRNAs targeting an HMGB1 gene can mediate RNAi, resulting in significant inhibition of expression of HMGB1. Thus, methods and compositions including these iRNAs are useful for preventing and treating a subject at risk of developing or diagnosed with an HMGB1-associated disorder, e.g., NAFLD or metabolic disorder. The methods and compositions herein are useful for reducing the level of HMGB1 in a subject, especially in a subject suffering from an HMGB1-associated disorder.

[0058] The following detailed description discloses how to make and use compositions containing iRNAs to inhibit the expression of an HMGB1 gene as well as compositions, uses, and methods for treating subjects that would benefit from reduction of the expression of an HMGB1 gene, e.g., subjects at risk of developing or diagnosed with an HMGB1-associated disorder, e.g., NAFLD or metabolic disorder.

### I. Definitions

[0059] In order that the present invention may be more readily understood, certain terms are first defined. In addition, it should be noted that whenever a value or range of values of a parameter are recited, it is intended that values and ranges intermediate to the recited values are also intended to be part of this invention.

[0060] The articles “a” and “an” are used herein to refer to one or to more than one (i.e., to at least one) of the grammatical object of the article. By way of example, “an element” means one element or more than one element, e.g., a plurality of elements.

[0061] The term “including” is used herein to mean, and is used interchangeably with, the phrase “including but not limited to”.

[0062] The term “or” is used herein to mean, and is used interchangeably with, the term “and/or,” unless context clearly indicates otherwise. For example, “sense strand or antisense strand” is understood as “sense strand or antisense strand or sense strand and antisense strand.”

[0063] The term “about” is used herein to mean within the typical ranges of tolerances in the art. For example, “about” can be understood as about 2 standard deviations from the mean. In certain embodiments, about means+10%. In certain embodiments, about means±5%. When about is present before a series of numbers or a range, it is understood that “about” can modify each of the numbers in the series or range.

[0064] The term “at least” prior to a number or series of numbers is understood to include the number adjacent to the term “at least”, and all subsequent numbers or integers that could logically be included, as clear from context. For example, the number of nucleotides in a nucleic acid molecule must be an integer. For example, “at least 18 nucleotides of a 21 nucleotide nucleic acid molecule” means that 18, 19, 20, or 21 nucleotides have the indicated property. When at least is present before a series of numbers or a range, it is understood that “at least” can modify each of the numbers in the series or range.

[0065] As used herein, “no more than” or “less than” is understood as the value adjacent to the phrase and logical lower values or integers, as logical from context, to zero. For example, a duplex with an overhang of “no more than 2 nucleotides” has a 2, 1, or 0 nucleotide overhang. When “no more than” is present before a series of numbers or a range, it is understood that “no more than” can modify each of the numbers in the series or range. As used herein, ranges include both the upper and lower limit.

[0066] In the event of a conflict between a sequence and its indicated site on a transcript or other sequence, the nucleotide sequence recited in the specification, e.g., in the tables providing duplex sequences, takes precedence.

[0067] As used herein, “High Mobility Group Box-1” or “HMGB1” is a protein that belongs to the High Mobility Group-box superfamily. The encoded non-histone, nuclear DNA-binding protein regulates transcription, and is involved in organization of DNA. This protein plays a role in several cellular processes, including inflammation, cell differentiation and tumor cell migration. Multiple pseudogenes of this gene have been identified. Alternative splicing results in multiple transcript variants that encode the same protein. Further information on HMGB1 is provided, for example, in the NCBI Gene database. HMGB1 is also known as HMG1; HMG3; HMG-1; SBP-1. Unless otherwise clear from context HMGB1, or variations of capitalization thereof, can refer to any of the gene, the RNA, and the protein, including processed and unprocessed forms or fragments of the protein or RNA.

[0068] As used herein, “HMGB1” refers to the naturally occurring gene that encodes the HMGB1 protein. The amino acid and complete coding sequences of the reference sequence of the human HMGB1 gene may be found in, for example, GenBank Accession No. NM_002128.5 (SEQ ID NO:1; SEQ ID NO:2). Mammalian orthologs of the human HMGB1 gene may be found in, for example, Accession No. NM_010439.4, mouse (SEQ ID NO: 3 and SEQ ID NO:4); Accession No. NM_012963.2, rat (SEQ ID NO:5 and SEQ ID NO: 6); and Accession No. NM_001283356.1, cynomolgus monkey (SEQ ID NO:7 and SEQ ID NO:8). Human HMGB1 transcript variants include NM_001313892.1 (SEQ ID NO: 9 and 10) and NM_001313893.1 (SEQ ID NO: 11 and 12).

[0069] A number of naturally occurring SNPs are known and can be found, for example, in the SNP database at the NCBI which lists SNPs in human HMGB1. In preferred embodiments, such naturally occurring variants are included within the scope of the HMGB1 gene sequence.

[0070] As used herein, an “HMGB1-associated disorder” and the like is understood as a disease or condition associated with liver steatosis, inflammation, fibrosis, or damage associated with an elevated level of HMGB1 or a release of HMGB1 from the liver cells due to cell death (e.g., necrosis or apoptosis) or active secretion. Exemplary HMGB1-associated disorders include metabolic disorder and the diagnostic components thereof, NAFLD (e.g., steatohepatitis, NASH, NASH cirrhosis, or cryptogenic cirrhosis), obesity, hepatic infection, hepatic inflammation, cirrhosis, autoimmune hepatitis, chronic alcohol consumption optionally in association with one or more of fatty liver and elevated serum lipids or cholesterol; alcoholic hepatitis, alcoholic steatohepatitis, hemochromatosis, and chronic use of pharmaceutical agents that cause liver damage. In certain embodiments, HMGB1-associated disorders are disorders associated with chronic insults. In certain embodiments, HMGB1-associated disorders exclude disorders associated with acute insults, e.g., acute liver toxicity due to poisoning, e.g., acute acetaminophen overdose.

[0071] As used herein, “target sequence” refers to a contiguous portion of the nucleotide sequence of an mRNA molecule formed during the transcription of an HMGB1 gene, including mRNA that is a product of RNA processing of a primary transcription product. The target portion of the sequence will be at least long enough to serve as a substrate for iRNA-directed cleavage at or near that portion of the nucleotide sequence of an mRNA molecule formed during the transcription of an HMGB1 gene. In one embodiment, the target sequence is within the protein coding region of HMGB1.

[0072] The target sequence may be from about 9-36 nucleotides in length, e.g., about 15-30 nucleotides in length. For example, the target sequence can be from about 15-30 nucleotides, 15-29, 15-28, 15-27, 15-26, 15-25, 15-24, 15-23, 15-22, 15-21, 15-20, 15-19, 15-18, 15-17, 18-30, 18-29, 18-28, 18-27, 18-26, 18-25, 18-24, 18-23, 18-22, 18-21, 18-20, 19-30, 19-29, 19-28, 19-27, 19-26, 19-25, 19-24, 19-23, 19-22, 19-21, 19-20, 20-30, 20-29, 20-28, 20-27, 20-26, 20-25, 20-24, 20-23, 20-22, 20-21, 21-30, 21-29, 21-28, 21-27, 21-26, 21-25, 21-24, 21-23, or 21-22 nucleotides in length. Ranges and lengths intermediate to the above recited ranges and lengths are also contemplated to be part of the invention.

[0073] As used herein, the term “strand comprising a sequence” refers to an oligonucleotide comprising a chain of nucleotides that is described by the sequence referred to using the standard nucleotide nomenclature.

[0074] “G,” “C,” “A,” “T,” and “U” each generally stand for a nucleotide that contains guanine, cytosine, adenine, thymidine, and uracil as a base, respectively. However, it will be understood that the term “ribonucleotide” or “nucleotide” can also refer to a modified nucleotide, as further detailed below, or a surrogate replacement moiety (see, e.g., Table 2). The skilled person is well aware that guanine, cytosine, adenine, and uracil can be replaced by other moieties without substantially altering the base pairing properties of an oligonucleotide comprising a nucleotide bearing such replacement moiety. For example, without limitation, a nucleotide comprising inosine as its base can base pair with nucleotides containing adenine, cytosine, or uracil. Hence, nucleotides containing uracil, guanine, or adenine can be replaced in the nucleotide sequences of dsRNA featured in the invention by a nucleotide containing, for example, inosine. In another example, adenine and cytosine anywhere in the oligonucleotide can be replaced with guanine and uracil, respectively to form G-U Wobble base pairing with the target mRNA. Sequences containing such replacement moieties are suitable for the compositions and methods featured in the invention.

[0075] The terms “iRNA”, “RNAi agent,” “iRNA agent,”, “RNA interference agent” as used interchangeably herein, refer to an agent that contains RNA as that term is defined herein, and which mediates the targeted cleavage of an RNA transcript via an RNA-induced silencing complex (RISC) pathway. iRNA directs the sequence-specific degradation of mRNA through a process known as RNA interference (RNAi). The iRNA modulates, e.g., inhibits, the expression of an HMGB1 gene in a cell, e.g., a cell within a subject, such as a mammalian subject.

[0076] In one embodiment, an RNAi agent of the invention includes a single stranded RNA that interacts with a target RNA sequence, e.g., an HMGB1 target mRNA sequence, to direct the cleavage of the target RNA. Without wishing to be bound by theory it is believed that long double stranded RNA introduced into cells is broken down into siRNA by a Type III endonuclease known as Dicer (Sharp et al. (2001) Genes Dev. 15:485). Dicer, a ribonuclease-III-like enzyme, processes the dsRNA into 19-23 base pair short interfering RNAs with characteristic two base 3′ overhangs (Bernstein, et al., (2001) Nature 409:363). The siRNAs are then incorporated into an RNA-induced silencing complex (RISC) where one or more helicases unwind the siRNA duplex, enabling the complementary antisense strand to guide target recognition (Nykanen, et al., (2001) Cell 107:309). Upon binding to the appropriate target mRNA, one or more endonucleases within the RISC cleave the target to induce silencing (Elbashir, et al., (2001) Genes Dev. 15:188). Thus, in one aspect the invention relates to a single stranded RNA (siRNA) generated within a cell and which promotes the formation of a RISC complex to effect silencing of the target gene, i.e., an HMGB1 gene. Accordingly, the term “siRNA” is also used herein to refer to an iRNA as described above.

[0077] In certain embodiments, the RNAi agent may be a single-stranded siRNA (ssRNAi) that is introduced into a cell or organism to inhibit a target mRNA. Single-stranded RNAi agents bind to the RISC endonuclease, Argonaute 2, which then cleaves the target mRNA. The single-stranded siRNAs are generally 15-30 nucleotides and are chemically modified. The design and testing of single-stranded siRNAs are described in U.S. Pat. No. 8,101,348 and in Lima et al., (2012) Cell 150:883-894, the entire contents of each of which are hereby incorporated herein by reference. Any of the antisense nucleotide sequences described herein may be used as a single-stranded siRNA as described herein or as chemically modified by the methods described in Lima et al., (2012) Cell 150:883-894.

[0078] In certain embodiments, an “iRNA” for use in the compositions, uses, and methods of the invention is a double stranded RNA and is referred to herein as a “double stranded RNA agent,” “double stranded RNA (dsRNA) molecule,” “dsRNA agent,” or “dsRNA”. The term “dsRNA”, refers to a complex of ribonucleic acid molecules, having a duplex structure comprising two anti-parallel and substantially complementary nucleic acid strands, referred to as having “sense” and “antisense” orientations with respect to a target RNA, i.e., an HMGB1 gene. In some embodiments of the invention, a double stranded RNA (dsRNA) triggers the degradation of a target RNA, e.g., an mRNA, through a post-transcriptional gene-silencing mechanism referred to herein as RNA interference or RNAi.

[0079] In general, the majority of nucleotides of each strand of a dsRNA molecule are ribonucleotides, but as described in detail herein, each or both strands can also include one or more non-ribonucleotides, e.g., a deoxyribonucleotide or a modified nucleotide. In addition, as used in this specification, an “IRNA” may include ribonucleotides with chemical modifications; an iRNA may include substantial modifications at multiple nucleotides. As used herein, the term “modified nucleotide” refers to a nucleotide having, independently, a modified sugar moiety, a modified internucleotide linkage, or modified nucleobase, or any combination thereof. Thus, the term modified nucleotide encompasses substitutions, additions or removal of, e.g., a functional group or atom, to internucleoside linkages, sugar moieties, or nucleobases. The modifications suitable for use in the agents of the invention include all types of modifications disclosed herein or known in the art. Any such modifications, as used in a siRNA type molecule, are encompassed by “iRNA” or “RNAi agent” for the purposes of this specification and claims.

[0080] The duplex region may be of any length that permits specific degradation of a desired target RNA through a RISC pathway, and may range from about 9 to 36 base pairs in length, e.g., about 15-30 base pairs in length, for example, about 9, 10, 11, 12, 13, 14, 15, 16, 17, 18, 19, 20, 21, 22, 23, 24, 25, 26, 27, 28, 29, 30, 31, 32, 33, 34, 35, or 36 base pairs in length, such as about 15-30, 15-29, 15-28, 15-27, 15-26, 15-25, 15-24, 15-23, 15-22, 15-21, 15-20, 15-19, 15-18, 15-17, 18-30, 18-29, 18-28, 18-27, 18-26, 18-25, 18-24, 18-23, 18-22, 18-21, 18-20, 19-30, 19-29, 19-28, 19-27, 19-26, 19-25, 19-24, 19-23, 19-22, 19-21, 19-20, 20-30, 20-29, 20-28, 20-27, 20-26, 20-25, 20-24,20-23, 20-22, 20-21, 21-30, 21-29, 21-28, 21-27, 21-26, 21-25, 21-24, 21-23, or 21-22 base pairs in length. Ranges and lengths intermediate to the above recited ranges and lengths are also contemplated to be part of the invention.

[0081] The two strands forming the duplex structure may be different portions of one larger RNA molecule, or they may be separate RNA molecules. Where the two strands are part of one larger molecule, and therefore are connected by an uninterrupted chain of nucleotides between the 3′-end of one strand and the 5′-end of the respective other strand forming the duplex structure, the connecting RNA chain is referred to as a “hairpin loop.” A hairpin loop can comprise at least one unpaired nucleotide. In some embodiments, the hairpin loop can comprise at least 2, 3, 4, 5, 6, 7, 8, 9, 10, 20, 23 or more unpaired nucleotides. In some embodiments, the hairpin loop can be 10 or fewer nucleotides. In some embodiments, the hairpin loop can be 8 or fewer unpaired nucleotides. In some embodiments, the hairpin loop can be 4-10 unpaired nucleotides. In some embodiments, the hairpin loop can be 4-8 nucleotides.

[0082] Where the two substantially complementary strands of a dsRNA are comprised by separate RNA molecules, those molecules need not be, but can be covalently connected. Where the two strands are connected covalently by means other than an uninterrupted chain of nucleotides between the 3′-end of one strand and the 5′-end of the respective other strand forming the duplex structure, the connecting structure is referred to as a “linker.” The RNA strands may have the same or a different number of nucleotides. The maximum number of base pairs is the number of nucleotides in the shortest strand of the dsRNA minus any overhangs that are present in the duplex. In addition to the duplex structure, an RNAi may comprise one or more nucleotide overhangs.

[0083] In certain embodiments, an iRNA agent of the invention is a dsRNA, each strand of which comprises 19-23 nucleotides, that interacts with a target RNA sequence, e.g., an HMGB1 gene, to direct cleavage of the target RNA.

[0084] In some embodiments, an iRNA of the invention is a dsRNA of 24-30 nucleotides that interacts with a target RNA sequence, e.g., an HMGB1 target mRNA sequence, to direct the cleavage of the target RNA.

[0085] As used herein, the term “nucleotide overhang” refers to at least one unpaired nucleotide that protrudes from the duplex structure of a double stranded iRNA. For example, when a 3′-end of one strand of a dsRNA extends beyond the 5′-end of the other strand, or vice versa, there is a nucleotide overhang. A dsRNA can comprise an overhang of at least one nucleotide. Alternatively the overhang can comprise at least two nucleotides, at least three nucleotides, at least four nucleotides, at least five nucleotides or more. A nucleotide overhang can comprise or consist of a nucleotide/nucleoside analog, including a deoxynucleotide/nucleoside. The overhang(s) can be on the sense strand, the antisense strand, or any combination thereof. Furthermore, the nucleotide(s) of an overhang can be present on the 5′-end, 3′-end, or both ends of either an antisense or sense strand of a dsRNA.

[0086] In certain embodiments, the antisense strand of a dsRNA has a 1-10 nucleotide, e.g., a 1, 2, 3, 4, 5, 6, 7, 8, 9, or 10 nucleotide overhang at the 3′-end or the 5′-end. In certain embodiments, the overhang on the sense strand or the antisense strand, or both, can include extended lengths longer than 10 nucleotides, e.g., 1-30 nucleotides, 2-30 nucleotides, 10-30 nucleotides, 10-25 nucleotides, 10-20 nucleotides, or 10-15 nucleotides in length. In certain embodiments, an extended overhang is on the sense strand of the duplex. In certain embodiments, an extended overhang is present on the 3′end of the sense strand of the duplex. In certain embodiments, an extended overhang is present on the 5′end of the sense strand of the duplex. In certain embodiments, an extended overhang is on the antisense strand of the duplex. In certain embodiments, an extended overhang is present on the 3′end of the antisense strand of the duplex. In certain embodiments, an extended overhang is present on the 5′end of the antisense strand of the duplex. In certain embodiments, one or more of the nucleotides in the extended overhang is replaced with a nucleoside thiophosphate. In certain embodiments, the overhang includes a self-complementary portion such that the overhang is capable of forming a hairpin structure that is stable under physiological conditions.

[0087] “Blunt” or “blunt end” means that there are no unpaired nucleotides at that end of the double stranded RNA agent, i.e., no nucleotide overhang. A “blunt ended” double stranded RNA agent is double stranded over its entire length, i.e., no nucleotide overhang at either end of the molecule. The RNAi agents of the invention include RNAi agents with no nucleotide overhang at one end (i.e., agents with one overhang and one blunt end) or with no nucleotide overhangs at either end. Most often such a molecule will be double-stranded over its entire length.

[0088] The term “antisense strand” or “guide strand” refers to the strand of an iRNA, e.g., a dsRNA, which includes a region that is substantially complementary to a target sequence, e.g., an HMGB1 mRNA. As used herein, the term “region of complementarity” refers to the region on the antisense strand that is substantially complementary to a sequence, for example a target sequence, e.g., an HMGB1 nucleotide sequence, as defined herein. Where the region of complementarity is not fully complementary to the target sequence, the mismatches can be in the internal or terminal regions of the molecule. Generally, the most tolerated mismatches are in the terminal regions, e.g., within 5, 4, or 3 nucleotides of the 5′- or 3′-end of the iRNA. In some embodiments, a double stranded RNA agent of the invention includes a nucleotide mismatch in the antisense strand. In some embodiments, a double stranded RNA agent of the invention includes a nucleotide mismatch in the sense strand. In some embodiments, the nucleotide mismatch is, for example, within 5, 4, 3 nucleotides from the 3′-end of the iRNA. In another embodiment, the nucleotide mismatch is, for example, in the 3′-terminal nucleotide of the iRNA.

[0089] The term “sense strand” or “passenger strand” as used herein, refers to the strand of an iRNA that includes a region that is substantially complementary to a region of the antisense strand as that term is defined herein.

[0090] As used herein, “substantially all of the nucleotides are modified” are largely but not wholly modified and can include not more than 5, 4, 3, 2, or 1 unmodified nucleotides.

[0091] As used herein, the term “cleavage region” refers to a region that is located immediately adjacent to the cleavage site. The cleavage site is the site on the target at which cleavage occurs. In some embodiments, the cleavage region comprises three bases on either end of, and immediately adjacent to, the cleavage site. In some embodiments, the cleavage region comprises two bases on either end of, and immediately adjacent to, the cleavage site. In some embodiments, the cleavage site specifically occurs at the site bound by nucleotides 10 and 11 of the antisense strand, and the cleavage region comprises nucleotides 11, 12, and 13.

[0092] As used herein, and unless otherwise indicated, the term “complementary,” when used to describe a first nucleotide sequence in relation to a second nucleotide sequence, refers to the ability of an oligonucleotide or polynucleotide comprising the first nucleotide sequence to hybridize and form a duplex structure under certain conditions with an oligonucleotide or polynucleotide comprising the second nucleotide sequence, as will be understood by the skilled person. Such conditions can, for example, be stringent conditions, where stringent conditions can include: 400 mM NaCl, 40 mM PIPES pH 6.4, 1 mM EDTA, 50° C. or 70° C. for 12-16 hours followed by washing (see, e.g., “Molecular Cloning: A Laboratory Manual, Sambrook, et al. (1989) Cold Spring Harbor Laboratory Press). Other conditions, such as physiologically relevant conditions as can be encountered inside an organism, can apply. The skilled person will be able to determine the set of conditions most appropriate for a test of complementarity of two sequences in accordance with the ultimate application of the hybridized nucleotides.

[0093] Complementary sequences within an iRNA, e.g., within a dsRNA as described herein, include base-pairing of the oligonucleotide or polynucleotide comprising a first nucleotide sequence to an oligonucleotide or polynucleotide comprising a second nucleotide sequence over the entire length of one or both nucleotide sequences. Such sequences can be referred to as “fully complementary” with respect to each other herein. However, where a first sequence is referred to as “substantially complementary” with respect to a second sequence herein, the two sequences can be fully complementary, or they can form one or more, but generally not more than 5, 4, 3, or 2 mismatched base pairs upon hybridization for a duplex up to 30 base pairs, while retaining the ability to hybridize under the conditions most relevant to their ultimate application, e.g., inhibition of gene expression via a RISC pathway. However, where two oligonucleotides are designed to form, upon hybridization, one or more single stranded overhangs, such overhangs shall not be regarded as mismatches with regard to the determination of complementarity. For example, a dsRNA comprising one oligonucleotide 21 nucleotides in length and another oligonucleotide 23 nucleotides in length, wherein the longer oligonucleotide comprises a sequence of 21 nucleotides that is fully complementary to the shorter oligonucleotide, can yet be referred to as “fully complementary” for the purposes described herein.

[0094] “Complementary” sequences, as used herein, can also include, or be formed entirely from, non-Watson-Crick base pairs or base pairs formed from non-natural and modified nucleotides, in so far as the above requirements with respect to their ability to hybridize are fulfilled. Such non-Watson-Crick base pairs include, but are not limited to, G: U Wobble or Hoogstein base pairing.

[0095] The terms “complementary,” “fully complementary” and “substantially complementary” herein can be used with respect to the base matching between the sense strand and the antisense strand of a dsRNA, or between the antisense strand of a double stranded RNA agent and a target sequence, as will be understood from the context of their use.

[0096] As used herein, a polynucleotide that is “substantially complementary to at least part of” a messenger RNA (mRNA) refers to a polynucleotide that is substantially complementary to a contiguous portion of the mRNA of interest (e.g., an mRNA encoding an HMGB1 gene). For example, a polynucleotide is complementary to at least a part of an HMGB1 mRNA if the sequence is substantially complementary to a non-interrupted portion of an mRNA encoding an HMGB1 gene.

[0097] Accordingly, in some embodiments, the sense strand polynucleotides disclosed herein are fully complementary to the target HMGB1 sequence. In some embodiments, the antisense polynucleotides disclosed herein are fully complementary to the target HMGB1 sequence. In other embodiments, the sense strand polynucleotides or the antisense polynucleotides disclosed herein are substantially complementary to the reverse complement of the target HMGB1 sequence and comprise a contiguous nucleotide sequence which is at least 80% complementary over its entire length to the equivalent region of the nucleotide sequence of SEQ ID NO:2, or a fragment of SEQ ID NO:2, such as at least 85%, 90%, or 95% complementary; or 100% complementary. In some embodiments, the antisense polynucleotides disclosed herein are substantially complementary to the target HMGB1 sequence and comprise a contiguous nucleotide sequence which is at least 80% complementary over its entire length to the equivalent region of the nucleotide sequence of SEQ ID NO:1, or a fragment of SEQ ID NO:1, such as at least 85%, 90%, or 95% complementary; or 100% complementary. Target sites can be defined by identification of a target site on the target HMGB1 sequence, e.g., SEQ ID NO: 1. A corresponding portion of SEQ ID NO: 2, the reverse complement of SEQ ID NO: 1, is a portion of SEQ ID NO: 2 that would be complementary to the portion of SEQ ID NO: 1 over a sufficient length to provide a double stranded RNAi as disclosed herein.

[0098] Accordingly, in some embodiments, the antisense strand polynucleotides disclosed herein are fully complementary to the target HMGB1 sequence. In other embodiments, the antisense strand polynucleotides disclosed herein are substantially complementary to the target HMGB1 sequence and comprise a contiguous nucleotide sequence which is at least about 80% complementary over its entire length to the equivalent region of the nucleotide sequence of SEQ ID NO:1, or a fragment of SEQ ID NO:1, such as about 85%, about 90%, or about 95%, complementary. In certain embodiments, the fragment of SEQ ID NO: 1 is selected from the group of nucleotides 830-851, 830-850, 831-851, 944-997, 944-990, 944-964, 968-997, 968-990, 968-995, 968-988, 969-989, 970-990, 971-991, 972-992, 972-995, 973-993, 974-994, 975-995, 976-996, 977-997, 1019-1039, 1158-1194, 1158-1182, 1158-1178, 1159-1179, 1160-1180, 1161-1181, 1162-1182, or 1174-1194 of SEQ ID NO: 1.

[0099] In some embodiments, an iRNA of the invention includes an antisense strand that is substantially complementary to the target HMGB1 sequence and comprises a contiguous nucleotide sequence which is at least about 80% complementary over its entire length to the equivalent region of the nucleotide sequence of any one of the sense strands in any one of Tables 3, 5, 6, or 7, or a fragment of any one of the sense strands in any one of Tables 3, 5, 6, or 7, such as about 85%, 90%, 95%, or 100% complementary.

[0100] In some embodiments, an iRNA of the invention includes a sense strand that is substantially complementary to an antisense polynucleotide which, in turn, is complementary to a target HMGB1 sequence, and wherein the sense strand polynucleotide comprises a contiguous nucleotide sequence which is at least about 80% complementary over its entire length to the equivalent region of the nucleotide sequence of any one of the antisense strands in any one of Tables 3, 5, 6, or 7, or a fragment of any one of the antisense strands in any one of Tables 3, 5, 6, or 7, such as about a85%, 90%, 95%, or 100%.

[0101] In certain embodiments, the sense and antisense strands in any one of Tables 3, 5, 6, or 7 are selected from duplexes AD-245281, AD-245282, AD-245305, AD-245336, AD-245339, AD-245383, AD-245472, AD-193177, AD-193312, AD-193168, AD-193313, AD-193180, AD-193182, AD-193314, AD-193173, AD-193311, AD-193179, AD-193178, AD-193174, AD-193315, AD-193175, AD-193326, AD-193176, AD-193181, AD-80651, or AD-80652.

[0102] In general, an “iRNA” includes ribonucleotides with chemical modifications. Such modifications may include all types of modifications disclosed herein or known in the art. Any such modifications, as used in a dsRNA molecule, are encompassed by “iRNA” for the purposes of this specification and claims.

[0103] In an aspect of the invention, an agent for use in the methods and compositions of the invention is a single-stranded antisense oligonucleotide molecule that inhibits a target mRNA via an antisense inhibition mechanism. The single-stranded antisense oligonucleotide molecule is complementary to a sequence within the target mRNA. The single-stranded antisense oligonucleotides can inhibit translation in a stoichiometric manner by base pairing to the mRNA and physically obstructing the translation machinery, see Dias, N. et al., (2002) Mol Cancer Ther 1:347-355. The single-stranded antisense oligonucleotide molecule may be about 14 to about 30 nucleotides in length and have a sequence that is complementary to a target sequence. For example, the single-stranded antisense oligonucleotide molecule may comprise a sequence that is at least about 14, 15, 16, 17, 18, 19, 20, or more contiguous nucleotides from any one of the antisense sequences described herein.

[0104] The phrase “contacting a cell with an iRNA,” such as a dsRNA, as used herein, includes contacting a cell by any possible means. Contacting a cell with an iRNA includes contacting a cell in vitro with the iRNA or contacting a cell in vivo with the iRNA. The contacting may be done directly or indirectly. Thus, for example, the iRNA may be put into physical contact with the cell by the individual performing the method, or alternatively, the iRNA may be put into a situation that will permit or cause it to subsequently come into contact with the cell.

[0105] Contacting a cell in vitro may be done, for example, by incubating the cell with the iRNA. Contacting a cell in vivo may be done, for example, by injecting the iRNA into or near the tissue where the cell is located, or by injecting the iRNA into another area, e.g., the bloodstream or the subcutaneous space, such that the agent will subsequently reach the tissue where the cell to be contacted is located. For example, the iRNA may contain or be coupled to a ligand, e.g., GalNAc, that directs the iRNA to a site of interest, e.g., the liver. Combinations of in vitro and in vivo methods of contacting are also possible. For example, a cell may also be contacted in vitro with an iRNA and subsequently transplanted into a subject.

[0106] In certain embodiments, contacting a cell with an iRNA includes “introducing” or “delivering the iRNA into the cell” by facilitating or effecting uptake or absorption into the cell. Absorption or uptake of an iRNA can occur through unaided diffusion or active cellular processes, or by auxiliary agents or devices. Introducing an iRNA into a cell may be in vitro or in vivo. For example, for in vivo introduction, iRNA can be injected into a tissue site or administered systemically. In vitro introduction into a cell includes methods known in the art such as electroporation and lipofection. Further approaches are described herein below or are known in the art.

[0107] The term “lipid nanoparticle” or “LNP” is a vesicle comprising a lipid layer encapsulating a pharmaceutically active molecule, such as a nucleic acid molecule, e.g., an iRNA or a plasmid from which an iRNA is transcribed. LNPs are described in, for example, U.S. Pat. Nos. 6,858,225, 6,815,432, 8,158,601, and 8,058,069, the entire contents of which are hereby incorporated herein by reference.

[0108] As used herein, a “subject” is an animal, such as a mammal, including a primate (such as a human, a non-human primate, e.g., a monkey, and a chimpanzee), a non-primate (such as a cow, a pig, a horse, a goat, a rabbit, a sheep, a hamster, a guinea pig, a cat, a dog, a rat, or a mouse), or a bird that expresses the target gene, either endogenously or heterologously. In certain embodiments, the subject is an animal that is diagnosed with or at risk of developing an HMGB1-associated disorder. In certain embodiments, the subject is an animal that is diagnosed with NASH or at risk of developing NASH, e.g. a subject at risk of developing or diagnosed with NAFLD or metabolic disorder. In certain embodiments, the subject is a subject meeting at least one diagnostic criterion for metabolic disorder, e.g., blood pressure equal to or higher than 130/85 mmHg, large waist circumference (40 inches or more for men and 35 inches or more for women); waist-to-hip ratio<1.0 (for men) or <0.8 (for women); low HDL cholesterol (under 40 mg/dL for men and under 50 mg/dL for women), or triglycerides of at least 150 mg/dL. In certain embodiments, the subject has one or more of Hb1Ac of at least 6.5%, type 2 diabetes mellitus, elevated fasting blood glucose of at least 100 mg/dL, 2 hour postprandial blood glucose or serum glucose concentration of at least 140 mg/dl. In certain embodiments, the subject is a subject meeting at least one diagnostic criteria for a NAFLD, e.g., for NAFL, steatohepatitis, NASH, NASH cirrhosis, or cryptogenic cirrhosis. In certain embodiments, the subject is a subject meeting at least one diagnositic criteria for NASH. In certain embodiments, the subject has been diagnosed with at least one of hepatic inflammation, cirrhosis, autoimmune hepatitis, chronic alcohol consumption optionally in association with one or more of fatty liver and elevated serum lipids or cholesterol; hemochromatosis, or has or had chronically used of pharmaceutical agents that cause liver damage. The diagnostic criteria for metabolic disorder and NAFLD, e.g., NASH are provided below. In certain embodiments, the subject at risk of developing NASH has been diagnosed with one of hypothyroidism, obstructive sleep apnea, hypopituitarism, hypogonadism, pancreatoduodenal resection, and psoriasis. It is understood that the diagnostic criteria for metabolic syndrome and various NAFLD are overlapping. In certain embodiments, the subject meets the full diagnositic criteria for metabolic disorder or a NAFLD, e.g., NASH. In certain embodiments, the subject has an HMGB1-associated disorder associated with a chronic insult. In some embodiments, the subject is a female human. In other embodiments, the subject is a male human.

[0109] As used herein, the terms “treating” or “treatment” refer to a beneficial or desired result, such as reducing at least one sign or symptom of an HMGB1-associated disorder, e.g., metabolic disorder or a NAFLD, e.g., NASH in a subject. “Treatment” can also mean prolonging survival as compared to expected survival in the absence of treatment.

[0110] The term “lower” in the context of the level of an HMGB1 gene expression or an HMGB1 protein production in a subject, or a disease marker or symptom refers to a statistically significant decrease in such level. The decrease can be, for example, at least 30%, 35%, 40%, 45%, 50%, 55%, 60%, 65%, 70%, 75%, 80%, 85%, 90%, or 95%, or below the level of detection for the detection method in a relevant cell or tissue, e.g., a liver cell, or other subject sample, e.g., urine, blood or serum derived therefrom. Lowering does not require systemic assessment of protein or RNA level. Lowering may be limited to a tissue, e.g., liver.

[0111] As used herein, “prevention” or “preventing,” when used in reference to a disease, disorder, or condition thereof, that would benefit from a reduction in expression of an HMGB1 gene or production of an HMGB1 protein, e.g., a subject at risk of developing an HMGB associated disorder, e.g., metabolic disorder, NAFLD, or NASH. In certain embodiments, a subject at risk of developing NASH has been diagnosed with NAFLD, hypothyroidism, obstructive sleep apnea, hypopituitarism, hypogonadism, pancreatoduodenal resection, or psoriasis. The failure to develop metabolic disorder or a NAFLD, e.g., NASH, or progression to a more severe NAFLD, e.g., from NAFL to NASH, by months or years is considered effective prevention. Prevention may require administration of more than one dose if the iRNA agent.

[0112] A “therapeutically-effective amount” or “prophylactically effective amount” also includes an amount of an RNAi agent that produces some desired local or systemic effect at a reasonable benefit/risk ratio applicable to any treatment. The iRNA employed in the methods of the present invention may be administered in a sufficient amount to produce a reasonable benefit/risk ratio applicable to such treatment.

[0113] The phrase “pharmaceutically acceptable” is employed herein to refer to those compounds, materials, compositions, or dosage forms which are, within the scope of sound medical judgment, suitable for use in contact with the tissues of human subjects and animal subjects without excessive toxicity, irritation, allergic response, or other problem or complication, commensurate with a reasonable benefit/risk ratio.

[0114] The phrase “pharmaceutically-acceptable carrier” as used herein means a pharmaceutically-acceptable material, composition, or vehicle, such as a liquid or solid filler, diluent, excipient, manufacturing aid (e.g., lubricant, talc magnesium, calcium or zinc stearate, or steric acid), or solvent encapsulating material, involved in carrying or transporting the subject compound from one organ, or portion of the body, to another organ, or portion of the body. Each carrier must be “acceptable” in the sense of being compatible with the other ingredients of the formulation and not injurious to the subject being treated. Pharmaceutically acceptable carriers include carriers for administration by injection. Pharmaceutically acceptable carriers include carriers for administration by inhalation. Some examples of materials which can serve as pharmaceutically-acceptable carriers include: (1) sugars, such as lactose, glucose and sucrose; (2) starches, such as corn starch and potato starch; (3) cellulose, and its derivatives, such as sodium carboxymethyl cellulose, ethyl cellulose and cellulose acetate; (4) powdered tragacanth; (5) malt; (6) gelatin; (7) lubricating agents, such as magnesium state, sodium lauryl sulfate and talc; (8) excipients, such as cocoa butter and suppository waxes; (9) oils, such as peanut oil, cottonseed oil, safflower oil, sesame oil, olive oil, corn oil and soybean oil; (10) glycols, such as propylene glycol; (11) polyols, such as glycerin, sorbitol, mannitol and polyethylene glycol; (12) esters, such as ethyl oleate and ethyl laurate; (13) agar; (14) buffering agents, such as magnesium hydroxide and aluminum hydroxide; (15) alginic acid; (16) pyrogen-free water; (17) isotonic saline; (18) Ringer's solution; (19) ethyl alcohol; (20) pH buffered solutions; (21) polyesters, polycarbonates or polyanhydrides; (22) bulking agents, such as polypeptides and amino acids (23) serum component, such as serum albumin, HDL and LDL; and (22) other non-toxic compatible substances employed in pharmaceutical formulations.

[0115] The term “sample,” as used herein, includes a collection of similar fluids, cells, or tissues isolated from a subject, as well as fluids, cells, or tissues present within a subject. Examples of biological fluids include blood, serum and serosal fluids, plasma, cerebrospinal fluid, ocular fluids, lymph, urine, saliva, and the like. Tissue samples may include samples from tissues, organs, or localized regions. For example, samples may be derived from particular organs, parts of organs, or fluids or cells within those organs. In certain embodiments, samples may be derived from the liver (e.g., whole liver or certain segments of liver or certain types of cells in the liver, such as, e.g., hepatocytes). In some embodiments, a “sample derived from a subject” refers to urine obtained from the subject. A “sample derived from a subject” can refer to urine, to blood, or blood derived serum or plasma from the subject.

I. iRNAs of the Invention

[0116] The present invention provides iRNAs which inhibit the expression of an HMGB1 gene. In preferred embodiments, the iRNA includes double stranded ribonucleic acid (dsRNA) molecules for inhibiting the expression of an HMGB1 gene in a cell, such as a cell within a subject, e.g., a mammal, such as a human at risk of developing an HMGB1-associated disorder, e.g., metabolic disorder, NAFLD, or NASH. The dsRNAi agent includes an antisense strand having a region of complementarity which is complementary to at least a part of an mRNA formed in the expression of an HMGB1 gene. The region of complementarity is about 30 nucleotides or less in length (e.g., about 30, 29, 28, 27, 26, 25, 24, 23, 22, 21, 20, 19, or 18 nucleotides or less in length). Upon contact with a cell expressing the HMGB1 gene, the iRNA inhibits the expression of the HMGB1 gene (e.g., a human, a primate, a non-primate, or a bird HMGB1 gene) by at least about 30%, preferably at least about 50% as assayed by, for example, a PCR or branched DNA (bDNA)-based method, or by a protein-based method, such as by immunofluorescence analysis, using, for example, western blotting or flow cytometric techniques. In preferred embodiments, inhibition of expression is determined by the qPCR method provided in the examples, especially in Example 2 with the siRNA at a 10 nM concentration in an appropriate organism cell line provided therein. In certain embodiments, inhibition of expression in vivo is determined by knockdown of the human gene in a rodent expressing the human gene, e.g., a mouse or an AAV-infected mouse expressing the human target gene, e.g., when administered a single dose at 3 mg/kg at the nadir of RNA expression. In certain embodiments, inhibition of expression is determined in an appropriate disease model in which the target gene is elevated in response to the disease indication, e.g., a mouse when administered a single dose at 3 mg/kg at the nadir of RNA expression. RNA expression in liver is determined using the PCR methods provided in Example 2. In certain embodiments, RNA expression is determined using a liver sample. In certain embodiments, RNA expression is determined in vesicle associated RNA from a blood or urine sample using methods known in the art as provided in e.g., Sehgal et al., RNA 20:143-149, 2014; Chan et al., Mol. Ther. Nucl. Acids. 4: e263, 2015.

[0117] A dsRNA includes two RNA strands that are complementary and hybridize to form a duplex structure under conditions in which the dsRNA will be used. One strand of a dsRNA (the antisense strand) includes a region of complementarity that is substantially complementary, and generally fully complementary, to a target sequence. The target sequence can be derived from the sequence of an mRNA formed during the expression of an HMGB1 gene. The other strand (the sense strand) includes a region that is complementary to the antisense strand, such that the two strands hybridize and form a duplex structure when combined under suitable conditions. As described elsewhere herein and as known in the art, the complementary sequences of a dsRNA can also be contained as self-complementary regions of a single nucleic acid molecule, as opposed to being on separate oligonucleotides.

[0118] Generally, the duplex structure is 15 to 30 base pairs in length, e.g., 15-29, 15-28, 15-27, 15-26, 15-25, 15-24, 15-23, 15-22, 15-21, 15-20, 15-19, 15-18, 15-17, 18-30, 18-29, 18-28, 18-27, 18-26, 18-25, 18-24, 18-23, 18-22, 18-21, 18-20, 19-30, 19-29, 19-28, 19-27, 19-26, 19-25, 19-24, 19-23, 19-22, 19-21, 19-20, 20-30, 20-29, 20-28, 20-27, 20-26, 20-25, 20-24,20-23, 20-22, 20-21, 21-30, 21-29, 21-28, 21-27, 21-26, 21-25, 21-24, 21-23, or 21-22 base pairs in length. In certain embodiments, the duplex length is 19-21 base pairs in length. Ranges and lengths intermediate to the above recited ranges and lengths are also contemplated to be part of the invention.

[0119] Similarly, the region of complementarity to the target sequence is 15 to 30 nucleotides in length, e.g., 15-29, 15-28, 15-27, 15-26, 15-25, 15-24, 15-23, 15-22, 15-21, 15-20, 15-19, 15-18, 15-17, 18-30, 18-29, 18-28, 18-27, 18-26, 18-25, 18-24, 18-23, 18-22, 18-21, 18-20, 19-30, 19-29, 19-28, 19-27, 19-26, 19-25, 19-24, 19-23, 19-22, 19-21, 19-20, 20-30, 20-29, 20-28, 20-27, 20-26, 20-25, 20-24,20-23, 20-22, 20-21, 21-30, 21-29, 21-28, 21-27, 21-26, 21-25, 21-24, 21-23, or 21-22 nucleotides in length. In certain embodiments, the region of complementarity is 19-21 nucleotides in length. Ranges and lengths intermediate to the above recited ranges and lengths are also contemplated to be part of the invention.

[0120] In some embodiments, the dsRNA is about 15 to about 23 nucleotides in length, or about 25 to about 30 nucleotides in length. In general, the dsRNA is long enough to serve as a substrate for the Dicer enzyme. For example, it is well-known in the art that dsRNAs longer than about 21-23 nucleotides in length may serve as substrates for Dicer. As the ordinarily skilled person will also recognize, the region of an RNA targeted for cleavage will most often be part of a larger RNA molecule, often an mRNA molecule. Where relevant, a “part” of an mRNA target is a contiguous sequence of an mRNA target of sufficient length to allow it to be a substrate for RNAi-directed cleavage (i.e., cleavage through a RISC pathway).

[0121] One of skill in the art will also recognize that the duplex region is a primary functional portion of a dsRNA, e.g., a duplex region of about 9 to about 36 base pairs, e.g., about 10-36, 11-36, 12-36, 13-36, 14-36, 15-36, 9-35, 10-35, 11-35, 12-35, 13-35, 14-35, 15-35, 9-34, 10-34, 11-34, 12-34, 13-34, 14-34, 15-34, 9-33, 10-33, 11-33, 12-33, 13-33, 14-33, 15-33, 9-32, 10-32, 11-32, 12-32, 13-32, 14-32, 15-32, 9-31, 10-31, 11-31, 12-31, 13-32, 14-31, 15-31, 15-30, 15-29, 15-28, 15-27, 15-26, 15-25, 15-24, 15-23, 15-22, 15-21, 15-20, 15-19, 15-18, 15-17, 18-30, 18-29, 18-28, 18-27, 18-26, 18-25, 18-24, 18-23, 18-22, 18-21, 18-20, 19-30, 19-29, 19-28, 19-27, 19-26, 19-25, 19-24, 19-23, 19-22, 19-21, 19-20, 20-30, 20-29, 20-28, 20-27, 20-26, 20-25, 20-24,20-23, 20-22, 20-21, 21-30, 21-29, 21-28, 21-27, 21-26, 21-25, 21-24, 21-23, or 21-22 base pairs. Thus, in one embodiment, to the extent that it becomes processed to a functional duplex, of e.g., 15-30 base pairs, that targets a desired RNA for cleavage, an RNA molecule or complex of RNA molecules having a duplex region greater than 30 base pairs is a dsRNA. Thus, an ordinarily skilled artisan will recognize that in one embodiment, a miRNA is a dsRNA. In another embodiment, a dsRNA is not a naturally occurring miRNA. In another embodiment, an iRNA agent useful to target HMGB1 gene expression is not generated in the target cell by cleavage of a larger dsRNA.

[0122] A dsRNA as described herein can further include one or more single-stranded nucleotide overhangs e.g., 1-4, 2-4, 1-3, 2-3, 1, 2, 3, or 4 nucleotides. dsRNAs having at least one nucleotide overhang can have superior inhibitory properties relative to their blunt-ended counterparts. A nucleotide overhang can comprise or consist of a nucleotide/nucleoside analog, including a deoxynucleotide/nucleoside. The overhang(s) can be on the sense strand, the antisense strand, or any combination thereof. Furthermore, the nucleotide(s) of an overhang can be present on the 5′-end, 3′-end, or both ends of an antisense or sense strand of a dsRNA.

[0123] A dsRNA can be synthesized by standard methods known in the art as further discussed below, e.g., by use of an automated DNA synthesizer, such as are commercially available from, for example, Biosearch, Applied Biosystems™, Inc.

[0124] Double stranded RNAi compounds of the invention may be prepared using a two-step procedure. First, the individual strands of the double stranded RNA molecule are prepared separately. Then, the component strands are annealed. The individual strands of the siRNA compound can be prepared using solution-phase or solid-phase organic synthesis or both. Organic synthesis offers the advantage that the oligonucleotide strands comprising unnatural or modified nucleotides can be easily prepared. Similarly, single-stranded oligonucleotides of the invention can be prepared using solution-phase or solid-phase organic synthesis or both.

[0125] In an aspect, a dsRNA of the invention includes at least two nucleotide sequences, a sense sequence and an anti-sense sequence. The sense strand is selected from the group of sequences provided in Tables 3 and 5, and the corresponding antisense strand of the sense strand is selected from the group of sequences of any one of Tables 3, 5, 6, or 7. In this aspect, one of the two sequences is complementary to the other of the two sequences, with one of the sequences being substantially complementary to a sequence of an mRNA generated in the expression of an HMGB1 gene. As such, in this aspect, a dsRNA will include two oligonucleotides, where one oligonucleotide is described as the sense strand in any one of Tables 3, 5, 6, or 7, and the second oligonucleotide is described as the corresponding antisense strand of the sense strand in any one of Tables 3, 5, 6, or 7. In certain embodiments, the substantially complementary sequences of the dsRNA are contained on separate oligonucleotides. In other embodiments, the substantially complementary sequences of the dsRNA are contained on a single oligonucleotide. In certain embodiments, the sense or antisense strand from any one of Tables 3, 5, 6, or 7 is selected from a sense or antisense strand of AD-245281, AD-245282, AD-245305, AD-245336, AD-245339, AD-245383, AD-245472, AD-193177, AD-193312, AD-193168, AD-193313, AD-193180, AD-193182, AD-193314, AD-193173, AD-193311, AD-193179, AD-193178, AD-193174, AD-193315, AD-193175, AD-193326, AD-193176, AD-193181, AD-80651, or AD-80652.

[0126] It will be understood that, although the sequences in Table 3 are not described as modified or conjugated sequences, the RNA of the iRNA of the invention e.g., a dsRNA of the invention, may comprise any one of the sequences set forth in Table 3, or the sequences of any one of Tables 5, 6, or 7 that are modified, or the sequences of any one of Tables 5, 6, or 7 that are conjugated. In other words, the invention encompasses dsRNA of any one of Tables 3, 5, 6, or 7 which are un-modified, un-conjugated, modified, or conjugated, as described herein.

[0127] The skilled person is well aware that dsRNAs having a duplex structure of about 20 to 23 base pairs, e.g., 21, base pairs have been hailed as particularly effective in inducing RNA interference (Elbashir et al., EMBO 2001, 20:6877-6888). However, others have found that shorter or longer RNA duplex structures can also be effective (Chu and Rana (2007) RNA 14:1714-1719; Kim et al. (2005) Nat Biotech 23:222-226). In the embodiments described above, by virtue of the nature of the oligonucleotide sequences provided in any one of any one of Tables 3, 5, 6, or 7, dsRNAs described herein can include at least one strand of a length of minimally 21 nucleotides. It can be reasonably expected that shorter duplexes having one of the sequences of any one of Tables 3, 5, 6, or 7 minus only a few nucleotides on one or both ends can be similarly effective as compared to the dsRNAs described above. Hence, dsRNAs having a sequence of at least 15, 16, 17, 18, 19, 20, or more contiguous nucleotides derived from one of the sequences of any one of Tables 3, 5, 6, or 7, and differing in their ability to inhibit the expression of an HMGB1 gene by not more than about 5, 10, 15, 20, 25, or 30% inhibition from a dsRNA comprising the full sequence, are contemplated to be within the scope of the present invention.

[0128] In addition, the RNAs provided in any one of Tables 3, 5, 6, or 7 identify a site(s) in an HMGB1 transcript that is susceptible to RISC-mediated cleavage. As such, the present invention further features iRNAs that target within one of these sites. As used herein, an iRNA is said to target within a particular site of an RNA transcript if the iRNA promotes cleavage of the transcript anywhere within that particular site. Such an iRNA will generally include at least about 15 contiguous nucleotides from one of the sequences provided in any one of Tables 3, 5, 6, or 7 coupled to additional nucleotide sequences taken from the region contiguous to the selected sequence in an HMGB1 gene.

[0129] An iRNA as described herein can contain one or more mismatches to the target sequence. In one embodiment, an iRNA as described herein contains no more than 3 mismatches. If the antisense strand of the iRNA contains mismatches to a target sequence, it is preferable that the area of mismatch is not located in the center of the region of complementarity. If the antisense strand of the iRNA contains mismatches to the target sequence, it is preferable that the mismatch be restricted to be within the last 5 nucleotides from either the 5′- or 3′-end of the region of complementarity. For example, for a 23 nucleotide iRNA agent the strand which is complementary to a region of an HMGB1 gene, generally does not contain any mismatch within the central 13 nucleotides. The methods described herein or methods known in the art can be used to determine whether an iRNA containing a mismatch to a target sequence is effective in inhibiting the expression of an HMGB1 gene. Consideration of the efficacy of iRNAs with mismatches in inhibiting expression of an HMGB1 gene is important, especially if the particular region of complementarity in an HMGB1 gene is known to have polymorphic sequence variation within the population.

II. Modified iRNAs of the Invention

[0130] In certain embodiments, the RNA of the iRNA of the invention e.g., a dsRNA, is un-modified, and does not comprise, e.g., chemical modifications or conjugations known in the art and described herein. In other embodiments, the RNA of an iRNA of the invention, e.g., a dsRNA, is chemically modified to enhance stability or other beneficial characteristics. In certain embodiments of the invention, substantially all of the nucleotides of an iRNA of the invention are modified. In other embodiments of the invention, all of the nucleotides of an iRNA or substantially all of the nucleotides of an iRNA are modified, i.e., not more than 5, 4, 3, 2, or 1 unmodified nucleotides are present in a strand of the iRNA.

[0131] The nucleic acids featured in the invention can be synthesized or modified by methods well established in the art, such as those described in “Current protocols in nucleic acid chemistry,” Beaucage, S. L. et al. (Edrs.), John Wiley & Sons, Inc., New York, NY, USA, which is hereby incorporated herein by reference. Modifications include, for example, end modifications, e.g., 5′-end modifications (phosphorylation, conjugation, inverted linkages) or 3′-end modifications (conjugation, DNA nucleotides, inverted linkages, etc.); base modifications, e.g., replacement with stabilizing bases, destabilizing bases, or bases that base pair with an expanded repertoire of partners, removal of bases (abasic nucleotides), or conjugated bases; sugar modifications (e.g., at the 2′-position or 4′-position) or replacement of the sugar; or backbone modifications, including modification or replacement of the phosphodiester linkages. Specific examples of iRNA compounds useful in the embodiments described herein include, but are not limited to, RNAs containing modified backbones or no natural internucleoside linkages. RNAs having modified backbones include, among others, those that do not have a phosphorus atom in the backbone. For the purposes of this specification, and as sometimes referenced in the art, modified RNAs that do not have a phosphorus atom in their internucleoside backbone can also be considered to be oligonucleosides. In some embodiments, a modified iRNA will have a phosphorus atom in its internucleoside backbone.

[0132] Modified RNA backbones include, for example, phosphorothioates, chiral phosphorothioates, phosphorodithioates, phosphotriesters, aminoalkylphosphotriesters, methyl and other alkyl phosphonates including 3′-alkylene phosphonates and chiral phosphonates, phosphinates, phosphoramidates including 3′-amino phosphoramidate and aminoalkylphosphoramidates, thionophosphoramidates, thionoalkylphosphonates, thionoalkylphosphotriesters, and boranophosphates having normal 3′-5′ linkages, 2′-5′-linked analogs of these, and those having inverted polarity wherein the adjacent pairs of nucleoside units are linked 3′-5′ to 5′-3′ or 2′-5′ to 5′-2′. Various salts, mixed salts and free acid forms are also included. In some embodiments of the invention, the dsRNA agents of the invention are in a free acid form. In other embodiments of the invention, the dsRNA agents of the invention are in a salt form. In one embodiment, the dsRNA agents of the invention are in a sodium salt form. In certain embodiments, when the dsRNA agents of the invention are in the sodium salt form, sodium ions are present in the agent as counterions for substantially all of the phosphodiester or phosphorothiotate groups present in the agent. Agents in which substantially all of the phosphodiester or phosphorothioate linkages have a sodium counterion include not more than 5, 4, 3, 2, or 1 phosphodiester or phosphorothioate linkages without a sodium counterion. In some embodiments, when the dsRNA agents of the invention are in the sodium salt form, sodium ions are present in the agent as counterions for all of the phosphodiester or phosphorothiotate groups present in the agent.

[0133] Representative U.S. Patents that teach the preparation of the above phosphorus-containing linkages include, but are not limited to, U.S. Pat. Nos. 3,687,808; 4,469,863; 4,476,301; 5,023,243; 5,177,195; 5,188,897; 5,264,423; 5,276,019; 5,278,302; 5,286,717; 5,321,131; 5,399,676; 5,405,939; 5,453,496; 5,455,233; 5,466,677; 5,476,925; 5,519,126; 5,536,821; 5,541,316; 5,550,111; 5,563,253; 5,571,799; 5,587,361; 5,625,050; 6,028,188; 6,124,445; 6,160,109; 6,169,170; 6,172,209; 6,239,265; 6,277,603; 6,326,199; 6,346,614; 6,444,423; 6,531,590; 6,534,639; 6,608,035; 6,683,167; 6,858,715; 6,867,294; 6,878,805; 7,015,315; 7,041,816; 7,273,933; 7,321,029; and U.S. Pat. RE39464, the entire contents of each of which are hereby incorporated herein by reference.

[0134] Modified RNA backbones that do not include a phosphorus atom therein have backbones that are formed by short chain alkyl or cycloalkyl internucleoside linkages, mixed heteroatoms and alkyl or cycloalkyl internucleoside linkages, or one or more short chain heteroatomic or heterocyclic internucleoside linkages. These include those having morpholino linkages (formed in part from the sugar portion of a nucleoside); siloxane backbones; sulfide, sulfoxide and sulfone backbones; formacetyl and thioformacetyl backbones; methylene formacetyl and thioformacetyl backbones; alkene containing backbones; sulfamate backbones; methyleneimino and methylenehydrazino backbones; sulfonate and sulfonamide backbones; amide backbones; and others having mixed N, O, S, and CH₂ component parts.

[0135] Representative U.S. Patents that teach the preparation of the above oligonucleosides include, but are not limited to, U.S. Pat. Nos. 5,034,506; 5,166,315; 5,185,444; 5,214,134; 5,216,141; 5,235,033; 5,64,562; 5,264,564; 5,405,938; 5,434,257; 5,466,677; 5,470,967; 5,489,677; 5,541,307; 5,561,225; 5,596,086; 5,602,240; 5,608,046; 5,610,289; 5,618,704; 5,623,070; 5,663,312; 5,633,360; 5,677,437; and 5,677,439, the entire contents of each of which are hereby incorporated herein by reference.

[0136] Suitable RNA mimetics are contemplated for use in iRNAs provided herein, in which both the sugar and the internucleoside linkage, i.e., the backbone, of the nucleotide units are replaced with novel groups. The base units are maintained for hybridization with an appropriate nucleic acid target compound. One such oligomeric compound in which an RNA mimetic that has been shown to have excellent hybridization properties is referred to as a peptide nucleic acid (PNA). In PNA compounds, the sugar backbone of an RNA is replaced with an amide containing backbone, in particular an aminoethylglycine backbone. The nucleobases are retained and are bound directly or indirectly to aza nitrogen atoms of the amide portion of the backbone. Representative US patents that teach the preparation of PNA compounds include, but are not limited to, U.S. Pat. Nos. 5,539,082; 5,714,331; and 5,719,262, the entire contents of each of which are hereby incorporated herein by reference. Additional PNA compounds suitable for use in the iRNAs of the invention are described in, for example, in Nielsen et al., Science, 1991, 254, 1497-1500.

[0137] Some embodiments featured in the invention include RNAs with phosphorothioate backbones and oligonucleosides with heteroatom backbones, and in particular —CH₂—NH—CH₂—, —CH₂—N(CH₃)—O—CH₂—[known as a methylene (methylimino) or MMI backbone], —CH₂—O—N(CH₃)—CH₂—, —CH₂—N(CH₃)—N(CH₃)—CH₂— and —N(CH₃)—CH₂—CH₂—[wherein the native phosphodiester backbone is represented as —O—P—O—CH₂—] of the above-referenced U.S. Pat. No. 5,489,677, and the amide backbones of the above-referenced U.S. Pat. No. 5,602,240. In some embodiments, the RNAs featured herein have morpholino backbone structures of the above-referenced U.S. Pat. No. 5,034,506.

[0138] Modified RNAs can also contain one or more substituted sugar moieties. The iRNAs, e.g., dsRNAs, featured herein can include one of the following at the 2′-position: OH; F; O-, S-, or N-alkyl; O-, S-, or N-alkenyl; O-, S- or N-alkynyl; or O-alkyl-O-alkyl, wherein the alkyl, alkenyl and alkynyl can be substituted or unsubstituted C₁ to C₁₀ alkyl or C₂ to C₁₀ alkenyl and alkynyl. Exemplary suitable modifications include O [(CH₂)O]ₘCH₃, O(CH₂).ₙOCH₃, O(CH₂)NH₂, O(CH₂)ₙCH₃, O(CH₂)ONH₂, and O(CH₂), ON [(CH₂), CH₃)]₂, where n and m are from 1 to about 10. In other embodiments, dsRNAs include one of the following at the 2′ position: C₁ to C₁₀ lower alkyl, substituted lower alkyl, alkaryl, aralkyl, O-alkaryl or O-aralkyl, SH, SCH3, OCN, C₁, Br, CN, CF₃, OCF₃, SOCH₃, SO₂CH_{3,0.0}, NO₂, N₃, NH₂, heterocycloalkyl, heterocycloalkaryl, aminoalkylamino, polyalkylamino, substituted silyl, an RNA cleaving group, a reporter group, an intercalator, a group for improving the pharmacokinetic properties of an iRNA, or a group for improving the pharmacodynamic properties of an iRNA, and other substituents having similar properties. In some embodiments, the modification includes a 2′-methoxyethoxy (2′-O—CH₂CH₂OCH₃, also known as 2′-O-(2-methoxyethyl) or 2′-MOE) (Martin et al., Helv. Chim. Acta, 1995, 78:486-504) i.e., an alkoxy-alkoxy group. Another exemplary modification is 2′-dimethylaminooxyethoxy, i.e., a O(CH₂)₂ON(CH₃)₂ group, also known as 2′-DMAOE, as described in examples herein below, and 2′-dimethylaminoethoxyethoxy (also known in the art as 2′-O-dimethylaminoethoxyethyl or 2′-DMAEOE), i.e., 2′-O—CH₂—O—CH₂—N(CH₂) 2. Further exemplary modifications include: 5′-Me-2′-F nucleotides, 5′-Me-2′-OMe nucleotides, 5′-Me-2′-deoxynucleotides, (both R and S isomers in these three families); 2′-alkoxyalkyl; and 2′-NMA (N-methylacetamide).

[0139] Other modifications include 2′-methoxy (2′—OCH₃), 2′-aminopropoxy (2′-OCH₂CH₂CH₂NH₂) and 2′-fluoro (2′-F). Similar modifications can also be made at other positions on the RNA of an iRNA, particularly the 3′ position of the sugar on the 3′ terminal nucleotide or in 2′-5′ linked dsRNAs and the 5′ position of 5′ terminal nucleotide. iRNAs can also have sugar mimetics such as cyclobutyl moieties in place of the pentofuranosyl sugar. Representative US patents that teach the preparation of such modified sugar structures include, but are not limited to, U.S. Pat. Nos. 4,981,957; 5,118,800; 5,319,080; 5,359,044; 5,393,878; 5,446,137; 5,466,786; 5,514,785; 5,519,134; 5,567,811; 5,576,427; 5,591,722; 5,597,909; 5,610,300; 5,627,053; 5,639,873; 5,646,265; 5,658,873; 5,670,633; and 5,700,920, certain of which are commonly owned with the instant application. The entire contents of each of the foregoing are hereby incorporated herein by reference.

[0140] An iRNA can also include nucleobase (often referred to in the art simply as “base”) modifications or substitutions. As used herein, “unmodified” or “natural” nucleobases include the purine bases adenine (A) and guanine (G), and the pyrimidine bases thymine (T), cytosine (C), and uracil (U). Modified nucleobases include other synthetic and natural nucleobases such as deoxy-thymine (dT), 5-methylcytosine (5-me-C), 5-hydroxymethyl cytosine, xanthine, hypoxanthine, 2-aminoadenine, 6-methyl and other alkyl derivatives of adenine and guanine, 2-propyl and other alkyl derivatives of adenine and guanine, 2-thiouracil, 2-thiothymine and 2-thiocytosine, 5-halouracil and cytosine, 5-propynyl uracil and cytosine, 6-azo uracil, cytosine and thymine, 5-uracil (pseudouracil), 4-thiouracil, 8-halo, 8-amino, 8-thiol, 8-thioalkyl, 8-hydroxyl anal other 8-substituted adenines and guanines, 5-halo, particularly 5-bromo, 5-trifluoromethyl and other 5-substituted uracils and cytosines, 7-methylguanine and 7-methyladenine, 8-azaguanine and 8-azaadenine, 7-deazaguanine and 7-daazaadenine and 3-deazaguanine and 3-deazaadenine. Further nucleobases include those disclosed in U.S. Pat. No. 3,687,808, those disclosed in Modified Nucleosides in Biochemistry, Biotechnology and Medicine, Herdewijn, P. ed. Wiley-VCH, 2008; those disclosed in The Concise Encyclopedia Of Polymer Science And Engineering, pages 858-859, Kroschwitz, J. L, ed. John Wiley & Sons, 1990, these disclosed by Englisch et al., Angewandte Chemie, International Edition, 1991, 30, 613, and those disclosed by Sanghvi, Y S., Chapter 15, dsRNA Research and Applications, pages 289-302, Crooke, S. T. and Lebleu, B., Ed., CRC Press, 1993. Certain of these nucleobases are particularly useful for increasing the binding affinity of the oligomeric compounds featured in the invention. These include 5-substituted pyrimidines, 6-azapyrimidines and N-2, N-6 and 0-6 substituted purines, including 2-aminopropyladenine, 5-propynyluracil and 5-propynylcytosine. 5-methylcytosine substitutions have been shown to increase nucleic acid duplex stability by 0.6-1.2° C. (Sanghvi, Y. S., Crooke, S. T. and Lebleu, B., Eds., dsRNA Research and Applications, CRC Press, Boca Raton, 1993, pp. 276-278) and are exemplary base substitutions, even more particularly when combined with 2′-O-methoxyethyl sugar modifications.

[0141] Representative U.S. Patents that teach the preparation of certain of the above noted modified nucleobases as well as other modified nucleobases include, but are not limited to, the above noted U.S. Pat. Nos. 3,687,808, 4,845,205; 5,130,30; 5,134,066; 5,175,273; 5,367,066; 5,432,272; 5,457,187; 5,459,255; 5,484,908; 5,502,177; 5,525,711; 5,552,540; 5,587,469; 5,594,121, 5,596,091; 5,614,617; 5,681,941; 5,750,692; 6,015,886; 6,147,200; 6,166,197; 6,222,025; 6,235,887; 6,380,368; 6,528,640; 6,639,062; 6,617,438; 7,045,610; 7,427,672; and 7,495,088, the entire contents of each of which are hereby incorporated herein by reference.

[0142] The RNA of an iRNA can also be modified to include one or more locked nucleic acids (LNA). A locked nucleic acid is a nucleotide having a modified ribose moiety in which the ribose moiety comprises an extra bridge connecting the 2′ and 4′ carbons. This structure effectively “locks” the ribose in the 3′-endo structural conformation. The addition of locked nucleic acids to siRNAs has been shown to increase siRNA stability in serum, and to reduce off-target effects (Elmen, J. et al., (2005) Nucleic Acids Research 33 (1): 439-447; Mook, OR. et al., (2007) Mol Canc Ther 6 (3): 833-843; Grunweller, A. et al., (2003) Nucleic Acids Research 31 (12): 3185-3193).

[0143] In some embodiments, the RNA of an iRNA can also be modified to include one or more bicyclic sugar moieties. A “bicyclic sugar” is a furanosyl ring modified by the bridging of two atoms. A “bicyclic nucleoside” (“BNA”) is a nucleoside having a sugar moiety comprising a bridge connecting two carbon atoms of the sugar ring, thereby forming a bicyclic ring system. In certain embodiments, the bridge connects the 4′-carbon and the 2′-carbon of the sugar ring. Thus, in some embodiments an agent of the invention may include one or more locked nucleic acids (LNA). A locked nucleic acid is a nucleotide having a modified ribose moiety in which the ribose moiety comprises an extra bridge connecting the 2′ and 4′ carbons. In other words, an LNA is a nucleotide comprising a bicyclic sugar moiety comprising a 4′-CH₂—O-2′ bridge. This structure effectively “locks” the ribose in the 3′-endo structural conformation. The addition of locked nucleic acids to siRNAs has been shown to increase siRNA stability in serum, and to reduce off-target effects (Elmen, J. et al., (2005) Nucleic Acids Research 33 (1): 439-447; Mook, OR. et al., (2007) Mol Canc Ther 6 (3): 833-843; Grunweller, A. et al., (2003) Nucleic Acids Research 31 (12): 3185-3193). Examples of bicyclic nucleosides for use in the polynucleotides of the invention include without limitation nucleosides comprising a bridge between the 4′ and the 2′ ribosyl ring atoms. In certain embodiments, the antisense polynucleotide agents of the invention include one or more bicyclic nucleosides comprising a 4′ to 2′ bridge. Examples of such 4′ to 2′ bridged bicyclic nucleosides, include but are not limited to 4′-(CH₂)—O-2′ (LNA); 4′-(CH₂)—S-2′; 4′-(CH₂) 2-O-2′ (ENA); 4′-CH(CH₃)—O-2′ (also referred to as “constrained ethyl” or “cEt”) and 4′-CH(CH₂OCH₃)—O-2′ (and analogs thereof; see, e.g., U.S. Pat. No. 7,399,845); 4′-C(CH₃) (CH₃)—O-2′ (and analogs thereof; see e.g., U.S. Pat. No. 8,278,283); 4′-CH₂—N(OCH₃)-2′ (and analogs thereof; see e.g., U.S. Pat. No. 8,278,425); 4′-CH₂-O-N(CH₃)-2′ (see, e.g., U.S. Patent Publication No. 2004/0171570); 4′-CH₂—N(R)—O-2′, wherein R is H, C₁-C₁₂ alkyl, or a protecting group (see, e.g., U.S. Pat. No. 7,427,672); 4′-CH₂-C(H) (CH₃)-2′ (see, e.g., Chattopadhyaya et al., J. Org. Chem., 2009, 74, 118-134); and 4′-CH₂—C(═CH₂)-2′ (and analogs thereof; see, e.g., U.S. Pat. No. 8,278,426). The entire contents of each of the foregoing are hereby incorporated herein by reference.

[0144] Additional representative U.S. Patents and U.S. Patent Publications that teach the preparation of locked nucleic acid nucleotides include, but are not limited to, the following: U.S. Pat. Nos. 6,268,490; 6,525,191; 6,670,461; 6,770,748; 6,794,499; 6,998,484; 7,053,207; 7,034,133;7,084,125; 7,399,845; 7,427,672; 7,569,686; 7,741,457; 8,022,193; 8,030,467; 8,278,425; 8,278,426; 8,278,283; US 2008/0039618; and US 2009/0012281, the entire contents of each of which are hereby incorporated herein by reference.

[0145] Any of the foregoing bicyclic nucleosides can be prepared having one or more stereochemical sugar configurations including for example α-L-ribofuranose and β-D-ribofuranose (see WO 99/14226).

[0146] The RNA of an iRNA can also be modified to include one or more constrained ethyl nucleotides. As used herein, a “constrained ethyl nucleotide” or “cEt” is a locked nucleic acid comprising a bicyclic sugar moiety comprising a 4′-CH(CH₃)—O-2′ bridge. In one embodiment, a constrained ethyl nucleotide is in the S conformation referred to herein as “S-cEt.”

[0147] An iRNA of the invention may also include one or more “conformationally restricted nucleotides” (“CRN”). CRN are nucleotide analogs with a linker connecting the C2′ and C4′ carbons of ribose or the C3 and —C5′ carbons of ribose. CRN lock the ribose ring into a stable conformation and increase the hybridization affinity to mRNA. The linker is of sufficient length to place the oxygen in an optimal position for stability and affinity resulting in less ribose ring puckering.

[0148] Representative publications that teach the preparation of certain of the above noted CRN include, but are not limited to, U.S. Patent Publication No. 2013/0190383; and PCT publication WO 2013/036868, the entire contents of each of which are hereby incorporated herein by reference.

[0149] In some embodiments, an iRNA of the invention comprises one or more monomers that are UNA (unlocked nucleic acid) nucleotides. UNA is unlocked acyclic nucleic acid, wherein any of the bonds of the sugar has been removed, forming an unlocked “sugar” residue. In one example, UNA also encompasses monomer with bonds between C1′-C4′ have been removed (i.e. the covalent carbon-oxygen-carbon bond between the C1′ and C4′ carbons). In another example, the C2′-C3′ bond (i.e. the covalent carbon-carbon bond between the C2′ and C3′ carbons) of the sugar has been removed (see Nuc. Acids Symp. Series, 52, 133-134 (2008) and Fluiter et al., Mol. Biosyst., 2009, 10, 1039 hereby incorporated by reference).

[0150] Representative U.S. patent publications that teach the preparation of UNA include, but are not limited to, U.S. Pat. No. 8,314,227; and U.S. Patent Publication Nos. 2013/0096289; 2013/0011922; and 2011/0313020, the entire contents of each of which are hereby incorporated herein by reference.

[0151] Potentially stabilizing modifications to the ends of RNA molecules can include N-(acetylaminocaproyl)-4-hydroxyprolinol (Hyp-C6-NHAc), N-(caproyl-4-hydroxyprolinol (Hyp-C6), N-(acetyl-4-hydroxyprolinol (Hyp-NHAc), thymidine-2′-O-deoxythymidine (ether), N-(aminocaproyl)-4-hydroxyprolinol (Hyp-C6-amino), 2-docosanoyl-uridine-3″-phosphate, inverted base dT (idT) and others. Disclosure of this modification can be found in PCT Publication No. WO 2011/005861.

[0152] Other modifications of the nucleotides of an iRNA of the invention include a 5′ phosphate or 5′ phosphate mimic, e.g., a 5′-terminal phosphate or phosphate mimic on the antisense strand of an iRNA. Suitable phosphate mimics are disclosed in, for example U.S. Patent Publication No. 2012/0157511, the entire contents of which are incorporated herein by reference.

A. Modified iRNAs Comprising Motifs of the Invention

[0153] In certain aspects of the invention, the double stranded RNA agents of the invention include agents with chemical modifications as disclosed, for example, in WO2013/075035, the entire contents of each of which are incorporated herein by reference. WO2013/075035 provides motifs of three identical modifications on three consecutive nucleotides into a sense strand or antisense strand of a dsRNAi agent, particularly at or near the cleavage site. In some embodiments, the sense strand and antisense strand of the dsRNAi agent may otherwise be completely modified. The introduction of these motifs interrupts the modification pattern, if present, of the sense or antisense strand. The dsRNAi agent may be optionally conjugated with a GalNAc derivative ligand, for instance on the sense strand.

[0154] More specifically, when the sense strand and antisense strand of the double stranded RNA agent are completely modified to have one or more motifs of three identical modifications on three consecutive nucleotides at or near the cleavage site of at least one strand of a dsRNAi agent, the gene silencing activity of the dsRNAi agent was observed.

[0155] Accordingly, the invention provides double stranded RNA agents capable of inhibiting the expression of a target gene (i.e., HMGB1 gene) in vivo. The RNAi agent comprises a sense strand and an antisense strand. Each strand of the RNAi agent may be, independently, 12-30 nucleotides in length. For example, each strand may independently be 14-30 nucleotides in length, 17-30 nucleotides in length, 25-30 nucleotides in length, 27-30 nucleotides in length, 17-23 nucleotides in length, 17-21 nucleotides in length, 17-19 nucleotides in length, 19-25 nucleotides in length, 19-23 nucleotides in length, 19-21 nucleotides in length, 21-25 nucleotides in length, or 21-23 nucleotides in length.

[0156] The sense strand and antisense strand typically form a duplex double stranded RNA (“dsRNA”), also referred to herein as “dsRNAi agent.” The duplex region of a dsRNAi agent may be 12-30 nucleotide pairs in length. For example, the duplex region can be 14-30 nucleotide pairs in length, 17-30 nucleotide pairs in length, 27-30 nucleotide pairs in length, 17-23 nucleotide pairs in length, 17-21 nucleotide pairs in length, 17-19 nucleotide pairs in length, 19-25 nucleotide pairs in length, 19-23 nucleotide pairs in length, 19-21 nucleotide pairs in length, 21-25 nucleotide pairs in length, or 21-23 nucleotide pairs in length. In another example, the duplex region is selected from 15, 16, 17, 18, 19, 20, 21, 22, 23, 24, 25, 26, and 27 nucleotides in length.

[0157] In certain embodiments, the dsRNAi agent may contain one or more overhang regions or capping groups at the 3′-end, 5′-end, or both ends of one or both strands. The overhang can be, independently, 1-6 nucleotides in length, for instance 2-6 nucleotides in length, 1-5 nucleotides in length, 2-5 nucleotides in length, 1-4 nucleotides in length, 2-4 nucleotides in length, 1-3 nucleotides in length, 2-3 nucleotides in length, or 1-2 nucleotides in length. In certain embodiments, the overhang regions can include extended overhang regions as provided above. The overhangs can be the result of one strand being longer than the other, or the result of two strands of the same length being staggered. The overhang can form a mismatch with the target mRNA or it can be complementary to the gene sequences being targeted or can be another sequence. The first and second strands can also be joined, e.g., by additional bases to form a hairpin, or by other non-base linkers.

[0158] In certain embodiments, the nucleotides in the overhang region of the dsRNAi agent can each independently be a modified or unmodified nucleotide including, but no limited to 2′-sugar modified, such as, 2′-F, 2′-O-methyl, thymidine (T), 2-O-methoxyethyl-5-methyluridine (Teo), 2-O-methoxyethyladenosine (Aeo), 2-O-methoxyethyl-5-methylcytidine (m5Ceo), and any combinations thereof. For example, TT can be an overhang sequence for either end on either strand. The overhang can form a mismatch with the target mRNA or it can be complementary to the gene sequences being targeted or can be another sequence.

[0159] The 5′- or 3′-overhangs at the sense strand, antisense strand, or both strands of the dsRNAi agent may be phosphorylated. In some embodiments, the overhang region(s) contains two nucleotides having a phosphorothioate between the two nucleotides, where the two nucleotides can be the same or different. In some embodiments, the overhang is present at the 3′-end of the sense strand, antisense strand, or both strands. In some embodiments, this 3′-overhang is present in the antisense strand. In some embodiments, this 3′-overhang is present in the sense strand.

[0160] The dsRNAi agent may contain only a single overhang, which can strengthen the interference activity of the RNAi, without affecting its overall stability. For example, the single-stranded overhang may be located at the 3′-end of the sense strand or, alternatively, at the 3′-end of the antisense strand. The RNAi may also have a blunt end, located at the 5′-end of the antisense strand (or the 3′-end of the sense strand) or vice versa. Generally, the antisense strand of the dsRNAi agent has a nucleotide overhang at the 3′-end, and the 5′-end is blunt. While not wishing to be bound by theory, the asymmetric blunt end at the 5′-end of the antisense strand and 3′-end overhang of the antisense strand favor the guide strand loading into RISC process.

[0161] In certain embodiments, the dsRNAi agent is a double ended bluntmer of 19 nucleotides in length, wherein the sense strand contains at least one motif of three 2′-F modifications on three consecutive nucleotides at positions 7, 8, 9 from the 5′end. The antisense strand contains at least one motif of three 2′-O-methyl modifications on three consecutive nucleotides at positions 11, 12, 13 from the 5′end.

[0162] In other embodiments, the dsRNAi agent is a double ended bluntmer of 20 nucleotides in length, wherein the sense strand contains at least one motif of three 2′-F modifications on three consecutive nucleotides at positions 8, 9, 10 from the 5′end. The antisense strand contains at least one motif of three 2′-O-methyl modifications on three consecutive nucleotides at positions 11, 12, 13 from the 5′end.

[0163] In yet other embodiments, the dsRNAi agent is a double ended bluntmer of 21 nucleotides in length, wherein the sense strand contains at least one motif of three 2′-F modifications on three consecutive nucleotides at positions 9, 10, 11 from the 5′end. The antisense strand contains at least one motif of three 2′-O-methyl modifications on three consecutive nucleotides at positions 11, 12, 13 from the 5′end.

[0164] In certain embodiments, the dsRNAi agent comprises a 21 nucleotide sense strand and a 23 nucleotide antisense strand, wherein the sense strand contains at least one motif of three 2′-F modifications on three consecutive nucleotides at positions 9, 10, 11 from the 5′end; the antisense strand contains at least one motif of three 2′-O-methyl modifications on three consecutive nucleotides at positions 11, 12, 13 from the 5′end, wherein one end of the RNAi agent is blunt, while the other end comprises a 2 nucleotide overhang. Preferably, the 2 nucleotide overhang is at the 3′-end of the antisense strand.

[0165] When the 2 nucleotide overhang is at the 3′-end of the antisense strand, there may be two phosphorothioate internucleotide linkages between the terminal three nucleotides, wherein two of the three nucleotides are the overhang nucleotides, and the third nucleotide is a paired nucleotide next to the overhang nucleotide. In one embodiment, the RNAi agent additionally has two phosphorothioate internucleotide linkages between the terminal three nucleotides at both the 5′-end of the sense strand and at the 5′-end of the antisense strand. In certain embodiments, every nucleotide in the sense strand and the antisense strand of the dsRNAi agent, including the nucleotides that are part of the motifs are modified nucleotides. In certain embodiments each residue is independently modified with a 2′-O-methyl or 3′-fluoro, e.g., in an alternating motif. Optionally, the dsRNAi agent further comprises a ligand (preferably GalNAc₃).

[0166] In certain embodiments, the dsRNAi agent comprises a sense and an antisense strand, wherein the sense strand is 25-30 nucleotide residues in length, wherein starting from the 5′ terminal nucleotide (position 1) positions 1 to 23 of the first strand comprise at least 8 ribonucleotides; the antisense strand is 36-66 nucleotide residues in length and, starting from the 3′ terminal nucleotide, comprises at least 8 ribonucleotides in the positions paired with positions 1-23 of sense strand to form a duplex; wherein at least the 3 ‘terminal nucleotide of antisense strand is unpaired with sense strand, and up to 6 consecutive 3’ terminal nucleotides are unpaired with sense strand, thereby forming a 3′ single stranded overhang of 1-6 nucleotides; wherein the 5′ terminus of antisense strand comprises from 10-30 consecutive nucleotides which are unpaired with sense strand, thereby forming a 10-30 nucleotide single stranded 5′ overhang; wherein at least the sense strand 5′ terminal and 3′ terminal nucleotides are base paired with nucleotides of antisense strand when sense and antisense strands are aligned for maximum complementarity, thereby forming a substantially duplexed region between sense and antisense strands; and antisense strand is sufficiently complementary to a target RNA along at least 19 ribonucleotides of antisense strand length to reduce target gene expression when the double stranded nucleic acid is introduced into a mammalian cell; and wherein the sense strand contains at least one motif of three 2′-F modifications on three consecutive nucleotides, where at least one of the motifs occurs at or near the cleavage site. The antisense strand contains at least one motif of three 2′-O-methyl modifications on three consecutive nucleotides at or near the cleavage site.

[0167] In certain embodiments, the dsRNAi agent comprises sense and antisense strands, wherein the dsRNAi agent comprises a first strand having a length which is at least 25 and at most 29 nucleotides and a second strand having a length which is at most 30 nucleotides with at least one motif of three 2′-O-methyl modifications on three consecutive nucleotides at position 11, 12, 13 from the 5′ end; wherein the 3′ end of the first strand and the 5′ end of the second strand form a blunt end and the second strand is 1˜4 nucleotides longer at its 3′ end than the first strand, wherein the duplex region which is at least 25 nucleotides in length, and the second strand is sufficiently complementary to a target mRNA along at least 19 nucleotide of the second strand length to reduce target gene expression when the RNAi agent is introduced into a mammalian cell, and wherein Dicer cleavage of the dsRNAi agent preferentially results in an siRNA comprising the 3′-end of the second strand, thereby reducing expression of the target gene in the mammal. Optionally, the dsRNAi agent further comprises a ligand.

[0168] In certain embodiments, the sense strand of the dsRNAi agent contains at least one motif of three identical modifications on three consecutive nucleotides, where one of the motifs occurs at the cleavage site in the sense strand.

[0169] In certain embodiments, the antisense strand of the dsRNAi agent can also contain at least one motif of three identical modifications on three consecutive nucleotides, where one of the motifs occurs at or near the cleavage site in the antisense strand.

[0170] For a dsRNAi agent having a duplex region of 17-23 nucleotides in length, e.g., 17-23 basepairs in length, the cleavage site of the antisense strand is typically around the 10, 11, and 12 positions from the 5′-end. Thus the motifs of three identical modifications may occur at the 9, 10, 11 positions; the 10, 11, 12 positions; the 11, 12, 13 positions; the 12, 13, 14 positions; or the 13, 14, 15 positions of the antisense strand, the count starting from the first nucleotide from the 5′-end of the antisense strand, or, the count starting from the first paired nucleotide within the duplex region from the 5′-end of the antisense strand. The cleavage site in the antisense strand may also change according to the length of the duplex region of the dsRNAi agent from the 5′-end.

[0171] The sense strand of the dsRNAi agent may contain at least one motif of three identical modifications on three consecutive nucleotides at the cleavage site of the strand; and the antisense strand may have at least one motif of three identical modifications on three consecutive nucleotides at or near the cleavage site of the strand. When the sense strand and the antisense strand form a dsRNA duplex, the sense strand and the antisense strand can be so aligned that one motif of the three nucleotides on the sense strand and one motif of the three nucleotides on the antisense strand have at least one nucleotide overlap, i.e., at least one of the three nucleotides of the motif in the sense strand forms a base pair with at least one of the three nucleotides of the motif in the antisense strand. Alternatively, at least two nucleotides may overlap, or all three nucleotides may overlap.

[0172] In some embodiments, the sense strand of the dsRNAi agent may contain more than one motif of three identical modifications on three consecutive nucleotides. The first motif may occur at or near the cleavage site of the strand and the other motifs may be a wing modification. The term “wing modification” herein refers to a motif occurring at another portion of the strand that is separated from the motif at or near the cleavage site of the same strand. The wing modification is either adjacent to the first motif or is separated by at least one or more nucleotides. When the motifs are immediately adjacent to each other than the chemistries of the motifs are distinct from each other, and when the motifs are separated by one or more nucleotide than the chemistries can be the same or different. Two or more wing modifications may be present. For instance, when two wing modifications are present, each wing modification may occur at one end relative to the first motif which is at or near cleavage site or on either side of the lead motif.

[0173] Like the sense strand, the antisense strand of the dsRNAi agent may contain more than one motifs of three identical modifications on three consecutive nucleotides, with at least one of the motifs occurring at or near the cleavage site of the strand. This antisense strand may also contain one or more wing modifications in an alignment similar to the wing modifications that may be present on the sense strand.

[0174] In some embodiments, the wing modification on the sense strand or antisense strand of the dsRNAi agent typically does not include the first one or two terminal nucleotides at the 3′-end, 5′-end, or both ends of the strand.

[0175] In other embodiments, the wing modification on the sense strand or antisense strand of the dsRNAi agent typically does not include the first one or two paired nucleotides within the duplex region at the 3′-end, 5′-end, or both ends of the strand.

[0176] When the sense strand and the antisense strand of the dsRNAi agent each contain at least one wing modification, the wing modifications may fall on the same end of the duplex region, and have an overlap of one, two, or three nucleotides.

[0177] When the sense strand and the antisense strand of the dsRNAi agent each contain at least two wing modifications, the sense strand and the antisense strand can be so aligned that two modifications each from one strand fall on one end of the duplex region, having an overlap of one, two, or three nucleotides; two modifications each from one strand fall on the other end of the duplex region, having an overlap of one, two or three nucleotides; two modifications one strand fall on each side of the lead motif, having an overlap of one, two or three nucleotides in the duplex region.

[0178] In some embodiments, every nucleotide in the sense strand and antisense strand of the dsRNAi agent, including the nucleotides that are part of the motifs, may be modified. Each nucleotide may be modified with the same or different modification which can include one or more alteration of one or both of the non-linking phosphate oxygens or of one or more of the linking phosphate oxygens; alteration of a constituent of the ribose sugar, e.g., of the 2′-hydroxyl on the ribose sugar; wholesale replacement of the phosphate moiety with “dephospho” linkers; modification or replacement of a naturally occurring base; and replacement or modification of the ribose-phosphate backbone.

[0179] As nucleic acids are polymers of subunits, many of the modifications occur at a position which is repeated within a nucleic acid, e.g., a modification of a base, or a phosphate moiety, or a non-linking O of a phosphate moiety. In some cases the modification will occur at all of the subject positions in the nucleic acid but in many cases it will not. By way of example, a modification may only occur at a 3′- or 5′-terminal position, may only occur in a terminal region, e.g., at a position on a terminal nucleotide or in the last 2, 3, 4, 5, or 10 nucleotides of a strand. A modification may occur in a double strand region, a single strand region, or in both. A modification may occur only in the double strand region of an RNA or may only occur in a single strand region of an RNA. For example, a phosphorothioate modification at a non-linking O position may only occur at one or both termini, may only occur in a terminal region, e.g., at a position on a terminal nucleotide or in the last 2, 3, 4, 5, or 10 nucleotides of a strand, or may occur in double strand and single strand regions, particularly at termini. The 5′-end or ends can be phosphorylated.

[0180] It may be possible, e.g., to enhance stability, to include particular bases in overhangs, or to include modified nucleotides or nucleotide surrogates, in single strand overhangs, e.g., in a 5′- or 3′-overhang, or in both. For example, it can be desirable to include purine nucleotides in overhangs. In some embodiments all or some of the bases in a 3′- or 5′-overhang may be modified, e.g., with a modification described herein. Modifications can include, e.g., the use of modifications at the 2′ position of the ribose sugar with modifications that are known in the art, e.g., the use of deoxyribonucleotides, 2′-deoxy-2′-fluoro (2′-F) or 2′-O-methyl modified instead of the ribosugar of the nucleobase, and modifications in the phosphate group, e.g., phosphorothioate modifications. Overhangs need not be homologous with the target sequence.

[0181] In some embodiments, each residue of the sense strand and antisense strand is independently modified with LNA, CRN, CET, UNA, HNA, CeNA, 2′-methoxyethyl, 2′-O-methyl, 2′-O-allyl, 2′-C-allyl, 2′-deoxy, 2′-hydroxyl, or 2′-fluoro. The strands can contain more than one modification. In one embodiment, each residue of the sense strand and antisense strand is independently modified with 2′-O-methyl or 2′-fluoro.

[0182] At least two different modifications are typically present on the sense strand and antisense strand. Those two modifications may be the 2′-O-methyl or 2′-fluoro modifications, or others.

[0183] In certain embodiments, the Nₐ or N_{b} comprises modifications of an alternating pattern. The term “alternating motif” as used herein refers to a motif having one or more modifications, each modification occurring on alternating nucleotides of one strand. The alternating nucleotide may refer to one per every other nucleotide or one per every three nucleotides, or a similar pattern. For example, if A, B, and C each represent one type of modification to the nucleotide, the alternating motif can be “ABABABABABAB . . . ,” “AABBAABBAABB . . . ” “AABAABAABAAB . . . ,” “AAABAAABAAAB . . . ,” “AAABBBAAABBB . . . ,” or “ABCABCABCABC . . . ,” etc.

[0184] The type of modifications contained in the alternating motif may be the same or different. For example, if A, B, C, D each represent one type of modification on the nucleotide, the alternating pattern, i.e., modifications on every other nucleotide, may be the same, but each of the sense strand or antisense strand can be selected from several possibilities of modifications within the alternating motif such as “ABABAB . . . “, “ACACAC . . . ” “BDBDBD . . . ” or “CDCDCD . . . ,” etc.

[0185] In some embodiments, the dsRNAi agent of the invention comprises the modification pattern for the alternating motif on the sense strand relative to the modification pattern for the alternating motif on the antisense strand is shifted. The shift may be such that the modified group of nucleotides of the sense strand corresponds to a differently modified group of nucleotides of the antisense strand and vice versa. For example, the sense strand when paired with the antisense strand in the dsRNA duplex, the alternating motif in the sense strand may start with “ABABAB” from 5′ to 3′ of the strand and the alternating motif in the antisense strand may start with “BABABA” from 5′ to 3′ of the strand within the duplex region. As another example, the alternating motif in the sense strand may start with “AABBAABB” from 5′ to 3′ of the strand and the alternating motif in the antisense strand may start with “BBAABBAA” from 5′ to 3′ of the strand within the duplex region, so that there is a complete or partial shift of the modification patterns between the sense strand and the antisense strand.

[0186] In some embodiments, the dsRNAi agent comprises the pattern of the alternating motif of 2′-O-methyl modification and 2′-F modification on the sense strand initially has a shift relative to the pattern of the alternating motif of 2′-O-methyl modification and 2′-F modification on the antisense strand initially, i.e., the 2′-O-methyl modified nucleotide on the sense strand base pairs with a 2′-F modified nucleotide on the antisense strand and vice versa. The 1 position of the sense strand may start with the 2′-F modification, and the 1 position of the antisense strand may start with the 2′-O-methyl modification.

[0187] The introduction of one or more motifs of three identical modifications on three consecutive nucleotides to the sense strand or antisense strand interrupts the initial modification pattern present in the sense strand or antisense strand. This interruption of the modification pattern of the sense or antisense strand by introducing one or more motifs of three identical modifications on three consecutive nucleotides to the sense or antisense strand may enhance the gene silencing activity against the target gene.

[0188] In some embodiments, when the motif of three identical modifications on three consecutive nucleotides is introduced to any of the strands, the modification of the nucleotide next to the motif is a different modification than the modification of the motif.

[0189] For example, the portion of the sequence containing the motif is “ . . . . NaYYYNb . . . ,” where “Y” represents the modification of the motif of three identical modifications on three consecutive nucleotide, and “Nₐ” and “No” represent a modification to the nucleotide next to the motif “YYY” that is different than the modification of Y, and where Nₐ and N_{b} can be the same or different modifications. Alternatively, Nₐ or N_{b} may be present or absent when there is a wing modification present.

[0190] The iRNA may further comprise at least one phosphorothioate or methylphosphonate internucleotide linkage. The phosphorothioate or methylphosphonate internucleotide linkage modification may occur on any nucleotide of the sense strand, antisense strand, or both strands in any position of the strand. For instance, the internucleotide linkage modification may occur on every nucleotide on the sense strand or antisense strand; each internucleotide linkage modification may occur in an alternating pattern on the sense strand or antisense strand; or the sense strand or antisense strand may contain both internucleotide linkage modifications in an alternating pattern. The alternating pattern of the internucleotide linkage modification on the sense strand may be the same or different from the antisense strand, and the alternating pattern of the internucleotide linkage modification on the sense strand may have a shift relative to the alternating pattern of the internucleotide linkage modification on the antisense strand. In one embodiment, a double-stranded RNAi agent comprises 6-8 phosphorothioate internucleotide linkages. In some embodiments, the antisense strand comprises two phosphorothioate internucleotide linkages at the 5′-end and two phosphorothioate internucleotide linkages at the 3′-end, and the sense strand comprises at least two phosphorothioate internucleotide linkages at either the 5′-end or the 3′-end.

[0191] In some embodiments, the dsRNAi agent comprises a phosphorothioate or methylphosphonate internucleotide linkage modification in the overhang region. For example, the overhang region may contain two nucleotides having a phosphorothioate or methylphosphonate internucleotide linkage between the two nucleotides. Internucleotide linkage modifications also may be made to link the overhang nucleotides with the terminal paired nucleotides within the duplex region. For example, at least 2, 3, 4, or all the overhang nucleotides may be linked through phosphorothioate or methylphosphonate internucleotide linkage, and optionally, there may be additional phosphorothioate or methylphosphonate internucleotide linkages linking the overhang nucleotide with a paired nucleotide that is next to the overhang nucleotide. For instance, there may be at least two phosphorothioate internucleotide linkages between the terminal three nucleotides, in which two of the three nucleotides are overhang nucleotides, and the third is a paired nucleotide next to the overhang nucleotide. These terminal three nucleotides may be at the 3′-end of the antisense strand, the 3′-end of the sense strand, the 5′-end of the antisense strand, or the 5′end of the antisense strand.

[0192] In some embodiments, the 2-nucleotide overhang is at the 3′-end of the antisense strand, and there are two phosphorothioate internucleotide linkages between the terminal three nucleotides, wherein two of the three nucleotides are the overhang nucleotides, and the third nucleotide is a paired nucleotide next to the overhang nucleotide. Optionally, the dsRNAi agent may additionally have two phosphorothioate internucleotide linkages between the terminal three nucleotides at both the 5′-end of the sense strand and at the 5′-end of the antisense strand.

[0193] In one embodiment, the dsRNAi agent comprises mismatch(es) with the target, within the duplex, or combinations thereof. The mismatch may occur in the overhang region or the duplex region. The base pair may be ranked on the basis of their propensity to promote dissociation or melting (e.g., on the free energy of association or dissociation of a particular pairing, the simplest approach is to examine the pairs on an individual pair basis, though next neighbor or similar analysis can also be used). In terms of promoting dissociation: A:U is preferred over G:C; G:U is preferred over G:C; and I:C is preferred over G:C (I=inosine). Mismatches, e.g., non-canonical or other than canonical pairings (as described elsewhere herein) are preferred over canonical (A:T, A:U, G:C) pairings; and pairings which include a universal base are preferred over canonical pairings.

[0194] In certain embodiments, the dsRNAi agent comprises at least one of the first 1, 2, 3, 4, or 5 base pairs within the duplex regions from the 5′-end of the antisense strand independently selected from the group of: A: U, G: U, I: C, and mismatched pairs, e.g., non-canonical or other than canonical pairings or pairings which include a universal base, to promote the dissociation of the antisense strand at the 5′-end of the duplex.

[0195] In certain embodiments, the nucleotide at the 1 position within the duplex region from the 5′-end in the antisense strand is selected from A, dA, dU, U, and dT. Alternatively, at least one of the first 1, 2, or 3 base pair within the duplex region from the 5′-end of the antisense strand is an AU base pair. For example, the first base pair within the duplex region from the 5′-end of the antisense strand is an AU base pair.

[0196] In other embodiments, the nucleotide at the 3′-end of the sense strand is deoxy-thymine (dT) or the nucleotide at the 3′-end of the antisense strand is deoxy-thymine (dT).

[0197] For example, there is a short sequence of deoxy-thymine nucleotides, for example, two dT nucleotides on the 3′-end of the sense, antisense strand, or both strands.

[0198] In certain embodiments, the sense strand sequence may be represented by formula (I):

5′nₚ-Nₐ—(X X X)ᵢ—N_{b}—Y Y Y—N_{b}—(ZZZ)ⱼ—Nₐ-n_{q}3′ (I)
[0199] wherein:
[0200] i and j are each independently 0 or 1;
[0201] p and q are each independently 0-6;
[0202] each Nₐ independently represents an oligonucleotide sequence comprising 0-25 modified nucleotides, each sequence comprising at least two differently modified nucleotides;
[0203] each N_{b} independently represents an oligonucleotide sequence comprising 0-10 modified nucleotides;
[0204] each nₚ and n_{q} independently represent an overhang nucleotide;
[0205] wherein N_{b} and Y do not have the same modification; and
[0206] XXX, YYY, and ZZZ each independently represent one motif of three identical modifications on three consecutive nucleotides. Preferably YYY is all 2′-F modified nucleotides.

[0207] In some embodiments, the Nₐ or N_{b} comprises modifications of alternating pattern.

[0208] In some embodiments, the YYY motif occurs at or near the cleavage site of the sense strand. For example, when the dsRNAi agent has a duplex region of 17-23 nucleotides in length, the YYY motif can occur at or the vicinity of the cleavage site (e.g.: can occur at positions 6, 7, 8; 7, 8, 9; 8, 9, 10; 9, 10, 11; 10, 11,12; or 11, 12, 13) of the sense strand, the count starting from the first nucleotide, from the 5′-end; or optionally, the count starting at the first paired nucleotide within the duplex region, from the 5′-end.

[0209] In one embodiment, i is 1 and j is 0, or i is 0 and j is 1, or both i and j are 1. The sense strand can therefore be represented by the following formulas:
[0210] 5′ nₚ-Nₐ—YYY-N_{b}-ZZZ-Nₐ-n_{q}3′ (Ib);
[0211] 5′ nₚ-Nₐ—XXX-N_{b}-YYY-Nₐ-n_{q}3′ (Ic); or
[0212] 5′ nₚ-Nₐ—XXX-N_{b}-YYY—N_{b}-ZZZ-Nₐ-n_{q}3′ (Id).

[0213] When the sense strand is represented by formula (Ib), N_{b} represents an oligonucleotide sequence comprising 0-10, 0-7, 0-5, 0-4, 0-2, or 0 modified nucleotides. Each Nₐ independently can represent an oligonucleotide sequence comprising 2-20, 2-15, or 2-10 modified nucleotides.

[0214] When the sense strand is represented as formula (Ic), N_{b} represents an oligonucleotide sequence comprising 0-10, 0-7, 0-10, 0-7, 0-5, 0-4, 0-2, or 0 modified nucleotides. Each Nₐ can independently represent an oligonucleotide sequence comprising 2-20, 2-15, or 2-10 modified nucleotides.

[0215] When the sense strand is represented as formula (Id), each N_{b} independently represents an oligonucleotide sequence comprising 0-10, 0-7, 0-5, 0-4, 0-2, or 0 modified nucleotides. Preferably, N_{b} is 0, 1, 2, 3, 4, 5, or 6 Each Nₐ can independently represent an oligonucleotide sequence comprising 2-20, 2-15, or 2-10 modified nucleotides.

[0216] Each of X, Y and Z may be the same or different from each other.

[0217] In other embodiments, i is 0 and j is 0, and the sense strand may be represented by the formula:

5′nₚ-Nₐ—YYY-Nₐ-n_{q}3′ (Ia).

[0218] When the sense strand is represented by formula (Ia), each Nₐ independently can represent an oligonucleotide sequence comprising 2-20, 2-15, or 2-10 modified nucleotides.

[0219] In one embodiment, the antisense strand sequence of the RNAi may be represented by formula (II):

5′n_{q}-Nₐ′—(Z′Z′Z′)ₖ-N_{b}′-Y′Y′Y′-N_{b}′—(X′X′X′)I-N′ₐ-nₚ′3′ (II)
[0220] wherein:
[0221] k and l are each independently 0 or 1;
[0222] p′ and q′ are each independently 0-6;
[0223] each Nₐ′ independently represents an oligonucleotide sequence comprising 0-25 modified nucleotides, each sequence comprising at least two differently modified nucleotides;
[0224] each N_{b}′ independently represents an oligonucleotide sequence comprising 0-10 modified nucleotides;
[0225] each nₚ′ and n_{q}′ independently represent an overhang nucleotide;
[0226] wherein N_{b}′ and Y′ do not have the same modification; and
[0227] X′X′X′, Y′Y′Y′, and Z′Z′Z′ each independently represent one motif of three identical modifications on three consecutive nucleotides.

[0228] In some embodiments, the Nₐ′ or N_{b}′ comprises modifications of alternating pattern.

[0229] The Y′Y′Y′ motif occurs at or near the cleavage site of the antisense strand. For example, when the dsRNAi agent has a duplex region of 17-23 nucleotides in length, the Y′Y′Y′ motif can occur at positions 9, 10, 11; 10, 11, 12; 11, 12, 13; 12, 13, 14; or 13, 14, 15 of the antisense strand, with the count starting from the first nucleotide, from the 5′-end; or optionally, the count starting at the first paired nucleotide within the duplex region, from the 5′-end. Preferably, the Y′Y′Y′ motif occurs at positions 11, 12, 13.

[0230] In certain embodiments, Y′Y′Y′ motif is all 2′-OMe modified nucleotides.

[0231] In certain embodiments, k is 1 and 1 is 0, or k is 0 and 1 is 1, or both k and 1 are 1.

[0232] The antisense strand can therefore be represented by the following formulas:

[0233] 5′ n_{q}-Nₐ′-Z′Z′Z′-ND′-Y′Y′Y′-Nₐ′-nₚ′ 3′ (IIb);

[0234] 5′ n_{q}′-Nₐ′-Y′Y′Y′-N_{b}′-X′X′X′-nₚ′ 3′ (IIc); or 5′ ng-Nₐ′-Z′Z′Z′-No′-Y′Y′Y′-No′-X′X′X′-Nₐ′-nₚ′ 3′ (IId).

[0235] When the antisense strand is represented by formula (IIb), N_{b}′ represents an oligonucleotide sequence comprising 0-10, 0-7, 0-10, 0-7, 0-5, 0-4, 0-2, or 0 modified nucleotides. Each Nₐ′ independently represents an oligonucleotide sequence comprising 2-20, 2-15, or 2-10 modified nucleotides.

[0236] When the antisense strand is represented as formula (IIc), N_{b}′ represents an oligonucleotide sequence comprising 0-10, 0-7, 0-10, 0-7, 0-5, 0-4, 0-2, or 0 modified nucleotides. Each Nₐ′ independently represents an oligonucleotide sequence comprising 2-20, 2-15, or 2-10 modified nucleotides.

[0237] When the antisense strand is represented as formula (IId), each N_{b}′ independently represents an oligonucleotide sequence comprising 0-10, 0-7, 0-10, 0-7, 0-5, 0-4, 0-2, or 0 modified nucleotides. Each Nₐ′ independently represents an oligonucleotide sequence comprising 2-20, 2-15, or 2-10 modified nucleotides. Preferably, N_{b} is 0, 1, 2, 3, 4, 5, or 6. In other embodiments, k is 0 and 1 is 0 and the antisense strand may be represented by the formula: 5′ nₚ′-Nₐ-Y′Y′Y′-Nₐ′-n_{q}′ 3′ (Ia).

[0238] When the antisense strand is represented as formula (IIa), each Nₐ′ independently represents an oligonucleotide sequence comprising 2-20, 2-15, or 2-10 modified nucleotides.

[0239] Each of X′, Y′ and Z′ may be the same or different from each other. Each nucleotide of the sense strand and antisense strand may be independently modified with LNA, CRN, UNA, cEt, HNA, CeNA, 2′-methoxyethyl, 2′-O-methyl, 2′-O-allyl, 2′-C-allyl, 2′-hydroxyl, or 2′-fluoro. For example, each nucleotide of the sense strand and antisense strand is independently modified with 2′-O-methyl or 2′-fluoro. Each X, Y, Z, X′, Y′, and Z′, in particular, may represent a 2′-O-methyl modification or a 2′-fluoro modification.

[0240] In some embodiments, the sense strand of the dsRNAi agent may contain YYY motif occurring at 9, 10, and 11 positions of the strand when the duplex region is 21 nt, the count starting from the first nucleotide from the 5′-end, or optionally, the count starting at the first paired nucleotide within the duplex region, from the 5′-end; and Y represents 2′-F modification. The sense strand may additionally contain XXX motif or ZZZ motifs as wing modifications at the opposite end of the duplex region; and XXX and ZZZ each independently represents a 2′-OMe modification or 2′-F modification.

[0241] In some embodiments the antisense strand may contain Y′Y′Y′ motif occurring at positions 11, 12, 13 of the strand, the count starting from the first nucleotide from the 5′-end, or optionally, the count starting at the first paired nucleotide within the duplex region, from the 5′-end; and Y′ represents 2′-O-methyl modification. The antisense strand may additionally contain X′X′X′ motif or Z′Z′Z′ motifs as wing modifications at the opposite end of the duplex region; and X′X′X′ and Z′Z′Z′ each independently represents a 2′-OMe modification or 2′-F modification.

[0242] The sense strand represented by any one of the above formulas (Ia), (Ib), (Ic), and (Id) forms a duplex with a antisense strand being represented by any one of formulas (IIa), (IIb), (IIc), and (IId), respectively.

[0243] Accordingly, the dsRNAi agents for use in the methods of the invention may comprise a sense strand and an antisense strand, each strand having 14 to 30 nucleotides, the iRNA duplex represented by formula (III):

sense: 5′nₚ-Nₐ—(X X X)ᵢ—N_{b}—Y Y Y—N_{b}—(ZZZ)j—Nₐ-n_{q}3′

antisense: 3′nₚ′-Nₐ′—(X′X′X′)K-ND′-Y′Y′Y′-Nₐ′—(Z′Z′Z′)_{I}—Nₐ′-n_{q}′5′ (III)
[0244] wherein:
[0245] i, j, k, and I are each independently 0 or 1;
[0246] p, p′, q, and q′ are each independently 0-6;
[0247] each Nₐ and Nₐ′ independently represents an oligonucleotide sequence comprising 0-25 modified nucleotides, each sequence comprising at least two differently modified nucleotides;
[0248] each N_{b} and N_{b}′ independently represents an oligonucleotide sequence comprising 0-10 modified nucleotides;
[0249] wherein each nₚ′, nₚ, n_{q}′, and n_{q}, each of which may or may not be present, independently represents an overhang nucleotide; and
[0250] XXX, YYY, ZZZ, X′X′X′, Y′Y′Y′, and Z′Z′Z′ each independently represent one motif of three identical modifications on three consecutive nucleotides.

[0251] In one embodiment, i is 0 and j is 0; or i is 1 and j is 0; or i is 0 and j is 1; or both i and j are 0; or both i and j are 1. In another embodiment, k is 0 and 1 is 0; or k is 1 and 1 is 0; k is 0 and 1 is 1; or both k and I are 0; or both k and I are 1.

[0252] Exemplary combinations of the sense strand and antisense strand forming an iRNA duplex include the formulas below:

5′nₚ-Nₐ-Y Y Y-Nₐ-n_{q}3′

3′nₚ′-Nₐ′-Y′Y′Y′-Nₐ′n_{q}′5′ (IIIa)

5′nₚ-Nₐ-Y Y Y—N_{b}-ZZZ-Nₐ-n_{q}3′3′nₚ′-Nₐ′-Y′Y′Y′-N_{b}′-Z′Z′Z′-Nₐ′n_{q}′5′ (IIIb)

5′nₚ-Nₐ-X X X—N_{b}-Y Y Y-Nₐ-n_{q}3′3′nₚ′-Nₐ′-X′X′X′-No′-Y′Y′Y′-Nₐ′-n_{q}′5′ (IIIc)

5′nₚ-Nₐ-X X X—N_{b}-Y Y Y—N_{b}-ZZZ-Nₐ-n_{q}3′3′nₚ′-Nₐ′-X′X′X′-No′-Y′Y′Y′-No′-Z′Z′Z′-Nₐ-n_{q}′5′ (IIId)

[0253] When the dsRNAi agent is represented by formula (IIIa), each Nₐ independently represents an oligonucleotide sequence comprising 2-20, 2-15, or 2-10 modified nucleotides.

[0254] When the dsRNAi agent is represented by formula (IIIb), each N_{b} independently represents an oligonucleotide sequence comprising 1-10, 1-7, 1-5, or 1-4 modified nucleotides. Each Nₐ independently represents an oligonucleotide sequence comprising 2-20, 2-15, or 2-10 modified nucleotides.

[0255] When the dsRNAi agent is represented as formula (IIIc), each N_{b}, N_{b}′ independently represents an oligonucleotide sequence comprising 0-10, 0-7, 0-10, 0-7, 0-5, 0-4, 0-2, or 0 modified nucleotides. Each Nₐ independently represents an oligonucleotide sequence comprising 2-20, 2-15, or 2-10 modified nucleotides.

[0256] When the dsRNAi agent is represented as formula (IIId), each No, No′ independently represents an oligonucleotide sequence comprising 0-10, 0-7, 0-10, 0-7, 0-5, 0-4, 0-2, or Omodified nucleotides. Each Nₐ, Nₐ independently represents an oligonucleotide sequence comprising 2-20, 2-15, or 2-10 modified nucleotides. Each of Nₐ, Nₐ′, N_{b}, and N_{b} independently comprises modifications of alternating pattern.

[0257] Each of X, Y, and Z in formulas (III), (IIIa), (IIIb), (IIIc), and (IIId) may be the same or different from each other.

[0258] When the dsRNAi agent is represented by formula (III), (IIIa), (IIIb), (IIIc), and (IIId), at least one of the Y nucleotides may form a base pair with one of the Y′ nucleotides. Alternatively, at least two of the Y nucleotides form base pairs with the corresponding Y′ nucleotides; or all three of the Y nucleotides all form base pairs with the corresponding Y′ nucleotides.

[0259] When the dsRNAi agent is represented by formula (IIIb) or (IIId), at least one of the Z nucleotides may form a base pair with one of the Z′ nucleotides. Alternatively, at least two of the Z nucleotides form base pairs with the corresponding Z′ nucleotides; or all three of the Z nucleotides all form base pairs with the corresponding Z′ nucleotides.

[0260] When the dsRNAi agent is represented as formula (IIIc) or (IIId), at least one of the X nucleotides may form a base pair with one of the X′ nucleotides. Alternatively, at least two of the X nucleotides form base pairs with the corresponding X′ nucleotides; or all three of the X nucleotides all form base pairs with the corresponding X′ nucleotides.

[0261] In certain embodiments, the modification on the Y nucleotide is different than the modification on the Y′ nucleotide, the modification on the Z nucleotide is different than the modification on the Z′ nucleotide, or the modification on the X nucleotide is different than the modification on the X′ nucleotide.

[0262] In certain embodiments, when the dsRNAi agent is represented by formula (IIId), the Nₐ modifications are 2′-O-methyl or 2′-fluoro modifications. In other embodiments, when the RNAi agent is represented by formula (IIId), the Nₐ modifications are 2′-O-methyl or 2′-fluoro modifications and nₚ′ >0 and at least one nₚ′ is linked to a neighboring nucleotide a via phosphorothioate linkage. In yet other embodiments, when the RNAi agent is represented by formula (IIId), the Nₐ modifications are 2′-O-methyl or 2′-fluoro modifications, nₚ′ >0 and at least one nₚ′ is linked to a neighboring nucleotide via phosphorothioate linkage, and the sense strand is conjugated to one or more GalNAc derivatives attached through a bivalent or trivalent branched linker (described below). In other embodiments, when the RNAi agent is represented by formula (IIId), the Nₐ modifications are 2′-O-methyl or 2′-fluoro modifications, nₚ′ >0 and at least one nₚ′ is linked to a neighboring nucleotide via phosphorothioate linkage, the sense strand comprises at least one phosphorothioate linkage, and the sense strand is conjugated to one or more GalNAc derivatives attached through a bivalent or trivalent branched linker.

[0263] In some embodiments, when the dsRNAi agent is represented by formula (IIIa), the Nₐ modifications are 2′-O-methyl or 2′-fluoro modifications, nₚ′ >0 and at least one nₚ′ is linked to a neighboring nucleotide via phosphorothioate linkage, the sense strand comprises at least one phosphorothioate linkage, and the sense strand is conjugated to one or more GalNAc derivatives attached through a bivalent or trivalent branched linker.

[0264] In some embodiments, the dsRNAi agent is a multimer containing at least two duplexes represented by formula (III), (IIIa), (IIIb), (IIIc), and (IIId), wherein the duplexes are connected by a linker. The linker can be cleavable or non-cleavable. Optionally, the multimer further comprises a ligand. Each of the duplexes can target the same gene or two different genes; or each of the duplexes can target same gene at two different target sites.

[0265] In some embodiments, the dsRNAi agent is a multimer containing three, four, five, six, or more duplexes represented by formula (III), (IIIa), (IIIb), (IIIc), and (IIId), wherein the duplexes are connected by a linker. The linker can be cleavable or non-cleavable. Optionally, the multimer further comprises a ligand. Each of the duplexes can target the same gene or two different genes; or each of the duplexes can target same gene at two different target sites.

[0266] In one embodiment, two dsRNAi agents represented by at least one of formulas (III), (IIIa), (IIIb), (IIIc), and (IIId) are linked to each other at the 5′ end, and one or both of the 3′ ends, and are optionally conjugated to a ligand. Each of the agents can target the same gene or two different genes; or each of the agents can target same gene at two different target sites.

[0267] In certain embodiments, an RNAi agent of the invention may contain a low number of nucleotides containing a 2′-fluoro modification, e.g., 10 or fewer nucleotides with 2′-fluoro modification. For example, the RNAi agent may contain 10, 9, 8, 7, 6, 5, 4, 3, 2, 1 or 0 nucleotides with a 2′-fluoro modification. In a specific embodiment, the RNAi agent of the invention contains 10 nucleotides with a 2′-fluoro modification, e.g., 4 nucleotides with a 2′-fluoro modification in the sense strand and 6 nucleotides with a 2′-fluoro modification in the antisense strand. In another specific embodiment, the RNAi agent of the invention contains 6 nucleotides with a 2′-fluoro modification, e.g., 4 nucleotides with a 2′-fluoro modification in the sense strand and 2 nucleotides with a 2′-fluoro modification in the antisense strand.

[0268] In other embodiments, an RNAi agent of the invention may contain an ultra low number of nucleotides containing a 2′-fluoro modification, e.g., 2 or fewer nucleotides containing a 2′-fluoro modification. For example, the RNAi agent may contain 2, 1 of 0 nucleotides with a 2′-fluoro modification. In a specific embodiment, the RNAi agent may contain 2 nucleotides with a 2′-fluoro modification, e.g., 0 nucleotides with a 2-fluoro modification in the sense strand and 2 nucleotides with a 2′-fluoro modification in the antisense strand.

[0269] Various publications describe multimeric iRNAs that can be used in the methods of the invention. Such publications include WO2007/091269, U.S. Pat. No. 7,858,769, WO2010/141511, WO2007/117686, WO2009/014887, and WO2011/031520 the entire contents of each of which are hereby incorporated herein by reference.

[0270] As described in more detail below, the iRNA that contains conjugations of one or more carbohydrate moieties to an iRNA can optimize one or more properties of the iRNA. In many cases, the carbohydrate moiety will be attached to a modified subunit of the iRNA. For example, the ribose sugar of one or more ribonucleotide subunits of a iRNA can be replaced with another moiety, e.g., a non-carbohydrate (preferably cyclic) carrier to which is attached a carbohydrate ligand. A ribonucleotide subunit in which the ribose sugar of the subunit has been so replaced is referred to herein as a ribose replacement modification subunit (RRMS). A cyclic carrier may be a carbocyclic ring system, i.e., all ring atoms are carbon atoms, or a heterocyclic ring system, i.e., one or more ring atoms may be a heteroatom, e.g., nitrogen, oxygen, sulfur. The cyclic carrier may be a monocyclic ring system, or may contain two or more rings, e.g. fused rings. The cyclic carrier may be a fully saturated ring system, or it may contain one or more double bonds.

[0271] The ligand may be attached to the polynucleotide via a carrier. The carriers include (i) at least one “backbone attachment point,” preferably two “backbone attachment points” and (ii) at least one “tethering attachment point.” A “backbone attachment point” as used herein refers to a functional group, e.g. a hydroxyl group, or generally, a bond available for, and that is suitable for incorporation of the carrier into the backbone, e.g., the phosphate, or modified phosphate, e.g., sulfur containing, backbone, of a ribonucleic acid. A “tethering attachment point” (TAP) in some embodiments refers to a constituent ring atom of the cyclic carrier, e.g., a carbon atom or a heteroatom (distinct from an atom which provides a backbone attachment point), that connects a selected moiety. The moiety can be, e.g., a carbohydrate, e.g. monosaccharide, disaccharide, trisaccharide, tetrasaccharide, oligosaccharide, or polysaccharide. Optionally, the selected moiety is connected by an intervening tether to the cyclic carrier. Thus, the cyclic carrier will often include a functional group, e.g., an amino group, or generally, provide a bond, that is suitable for incorporation or tethering of another chemical entity, e.g., a ligand to the constituent ring.

[0272] The iRNA may be conjugated to a ligand via a carrier, wherein the carrier can be cyclic group or acyclic group; preferably, the cyclic group is selected from pyrrolidinyl, pyrazolinyl, pyrazolidinyl, imidazolinyl, imidazolidinyl, piperidinyl, piperazinyl, [1,3]dioxolane, oxazolidinyl, isoxazolidinyl, morpholinyl, thiazolidinyl, isothiazolidinyl, quinoxalinyl, pyridazinonyl, tetrahydrofuryl, and decalin; preferably, the acyclic group is a serinol backbone or diethanolamine backbone.

[0273] In another embodiment of the invention, an iRNA agent comprises a sense strand and an antisense strand, each strand having 14 to 40 nucleotides. The RNAi agent may be represented by formula (L):

[chemical structure]

### (L),

In formula (L), B1, B2, B3, B1′, B2′, B3′, and B4′ each are independently a nucleotide containing a modification selected from the group consisting of 2′-O-alkyl, 2′-substituted alkoxy, 2′-substituted alkyl, 2′-halo, ENA, and BNA/LNA. In one embodiment, B1, B2, B3, B1′, B2′, B3′, and B4′ each contain 2′-OMe modifications. In one embodiment, B1, B2, B3, B1′, B2′, B3′, and B4′ each contain 2′-OMe or 2′-F modifications. In one embodiment, at least one of B1, B2, B3, B1′, B2′, B3′, and B4′ contain 2′-O-N-methylacetamido (2′-O-NMA) modification.

[0274] C1 is a thermally destabilizing nucleotide placed at a site opposite to the seed region of the antisense strand (i.e., at positions 2-8 of the 5′-end of the antisense strand). For example, C1 is at a position of the sense strand that pairs with a nucleotide at positions 2-8 of the 5′-end of the antisense strand. In one example, C1 is at position 15 from the 5′-end of the sense strand. C1 nucleotide bears the thermally destabilizing modification which can include abasic modification; mismatch with the opposing nucleotide in the duplex; and sugar modification such as 2′-deoxy modification or acyclic nucleotide e.g., unlocked nucleic acids (UNA) or glycerol nucleic acid (GNA). In one embodiment, C1 has thermally destabilizing modification selected from the group consisting of: i) mismatch with the opposing nucleotide in the antisense strand; ii) abasic modification selected from the group consisting of:

[chemical structure]

and iii) sugar modification selected from the group consisting of:

[chemical structure]

wherein B is a modified or unmodified nucleobase, R¹ and R² independently are H, halogen, OR3, or alkyl; and R³ is H, alkyl, cycloalkyl, aryl, aralkyl, heteroaryl or sugar. In one embodiment, the thermally destabilizing modification in C1 is a mismatch selected from the group consisting of G:G, G:A, G:U, G:T, A:A, A:C, C:C, C:U, C:T, U:U, T:T, and U:T; and optionally, at least one nucleobase in the mismatch pair is a 2′-deoxy nucleobase. In one example, the thermally destabilizing modification in C1 is GNA or

[chemical structure]

T1, T1′, T2′, and T3′ each independently represent a nucleotide comprising a modification providing the nucleotide a steric bulk that is less or equal to the steric bulk of a 2′-OMe modification. A steric bulk refers to the sum of steric effects of a modification. Methods for determining steric effects of a modification of a nucleotide are known to one skilled in the art. The modification can be at the 2′ position of a ribose sugar of the nucleotide, or a modification to a non-ribose nucleotide, acyclic nucleotide, or the backbone of the nucleotide that is similar or equivalent to the 2′ position of the ribose sugar, and provides the nucleotide a steric bulk that is less than or equal to the steric bulk of a 2′-OMe modification. For example, T1, T1′, T2′, and T3′ are each independently selected from DNA, RNA, LNA, 2′-F, and 2′-F-5′-methyl. In one embodiment, T1 is DNA. In one embodiment, T1′ is DNA, RNA or LNA. In one embodiment, T2′ is DNA or RNA. In one embodiment, T3′ is DNA or RNA.
n¹, n³, and q¹ are independently 4 to 15 nucleotides in length.
n⁵, q³, and q⁷ are independently 1-6 nucleotide(s) in length.
n⁴, q², and q⁶ are independently 1-3 nucleotide(s) in length; alternatively, n⁴ is 0.
q⁵ is independently 0-10 nucleotide(s) in length.
n² and q⁴ are independently 0-3 nucleotide(s) in length.

[0275] Alternatively, n⁴ is 0-3 nucleotide(s) in length.

[0276] In one embodiment, n⁴ can be 0. In one example, n⁴ is 0, and q² and q⁶ are 1. In another example, n⁴ is 0, and q² and q⁶ are 1, with two phosphorothioate internucleotide linkage modifications within position 1-5 of the sense strand (counting from the 5′-end of the sense strand), and two phosphorothioate internucleotide linkage modifications at positions 1 and 2 and two phosphorothioate internucleotide linkage modifications within positions 18-23 of the antisense strand (counting from the 5′-end of the antisense strand).

[0277] In one embodiment, n⁴, q², and q⁶ are each 1.

[0278] In one embodiment, n², n⁴, q², q⁴, and q⁶ are each 1.

[0279] In one embodiment, C1 is at position 14-17 of the 5′-end of the sense strand, when the sense strand is 19-22 nucleotides in length, and n⁴ is 1. In one embodiment, C1 is at position 15 of the 5′-end of the sense strand

[0280] In one embodiment, T3′ starts at position 2 from the 5′ end of the antisense strand.

[0281] In one example, T3′ is at position 2 from the 5′ end of the antisense strand and q⁶ is equal to 1.

[0282] In one embodiment, T1′ starts at position 14 from the 5′ end of the antisense strand. In one example, T1′ is at position 14 from the 5′ end of the antisense strand and q² is equal to 1.

[0283] In an exemplary embodiment, T3′ starts from position 2 from the 5′ end of the antisense strand and T1′ starts from position 14 from the 5′ end of the antisense strand. In one example, T3′ starts from position 2 from the 5′ end of the antisense strand and q⁶ is equal to 1 and T1′ starts from position 14 from the 5′ end of the antisense strand and q² is equal to 1.

[0284] In one embodiment, T1′ and T3′ are separated by 11 nucleotides in length (i.e. not counting the T1′ and T3′ nucleotides).

[0285] In one embodiment, T1′ is at position 14 from the 5′ end of the antisense strand. In one example, T1′ is at position 14 from the 5′ end of the antisense strand and q² is equal to 1, and the modification at the 2′ position or positions in a non-ribose, acyclic or backbone that provide less steric bulk than a 2′-OMe ribose.

[0286] In one embodiment, T3′ is at position 2 from the 5′ end of the antisense strand. In one example, T3′ is at position 2 from the 5′ end of the antisense strand and q⁶ is equal to 1, and the modification at the 2′ position or positions in a non-ribose, acyclic or backbone that provide less than or equal to steric bulk than a 2′-OMe ribose.

[0287] In one embodiment, T1 is at the cleavage site of the sense strand. In one example, T1 is at position 11 from the 5′ end of the sense strand, when the sense strand is 19-22 nucleotides in length, and n² is 1. In an exemplary embodiment, T1 is at the cleavage site of the sense strand at position 11 from the 5′ end of the sense strand, when the sense strand is 19-22 nucleotides in length, and n² is 1,

[0288] In one embodiment, T2′ starts at position 6 from the 5′ end of the antisense strand. In one example, T2′ is at positions 6-10 from the 5′ end of the antisense strand, and q⁴ is 1. In an exemplary embodiment, T1 is at the cleavage site of the sense strand, for instance, at position 11 from the 5′ end of the sense strand, when the sense strand is 19-22 nucleotides in length, and n² is 1; T1′ is at position 14 from the 5′ end of the antisense strand, and q² is equal to 1, and the modification to T1′ is at the 2′ position of a ribose sugar or at positions in a non-ribose, acyclic or backbone that provide less steric bulk than a 2′-OMe ribose; T2′ is at positions 6-10 from the 5′ end of the antisense strand, and q⁴ is 1; and T3′ is at position 2 from the 5′ end of the antisense strand, and q⁶ is equal to 1, and the modification to T3′ is at the 2′ position or at positions in a non-ribose, acyclic or backbone that provide less than or equal to steric bulk than a 2′-OMe ribose.

[0289] In one embodiment, T2′ starts at position 8 from the 5′ end of the antisense strand. In one example, T2′ starts at position 8 from the 5′ end of the antisense strand, and q⁴ is 2. In one embodiment, T2′ starts at position 9 from the 5′ end of the antisense strand. In one example, T2′ is at position 9 from the 5′ end of the antisense strand, and q⁴ is 1.

[0290] In one embodiment, B1′ is 2′-OMe or 2′-F, q¹ is 9, T1′ is 2′-F, q² is 1, B2′ is 2′-OMe or 2′-F, q³ is 4, T2′ is 2′-F, q⁴ is 1, B3′ is 2′-OMe or 2′-F, q⁵ is 6, T3′ is 2′-F, q⁶ is 1, B4′ is 2′-OMe, and q⁷ is 1; with two phosphorothioate internucleotide linkage modifications within positions 1-5 of the sense strand (counting from the 5′-end of the sense strand), and two phosphorothioate internucleotide linkage modifications at positions 1 and 2 and two phosphorothioate internucleotide linkage modifications within positions 18-23 of the antisense strand (counting from the 5′-end of the antisense strand).

[0291] In one embodiment, n⁴ is 0, B3 is 2′-OMe, n⁵ is 3, B1′ is 2′-OMe or 2′-F, q¹ is 9, T1′ is 2′-F, q² is 1, B2′ is 2′-OMe or 2′-F, q³ is 4, T2′ is 2′-F, q⁴ is 1, B3′ is 2′-OMe or 2′-F, q⁵ is 6, T3′ is 2′-F, q⁶ is 1, B4′ is 2′-OMe, and q⁷ is 1; with two phosphorothioate internucleotide linkage modifications within positions 1-5 of the sense strand (counting from the 5′-end of the sense strand), and two phosphorothioate internucleotide linkage modifications at positions 1 and 2 and two phosphorothioate internucleotide linkage modifications within positions 18-23 of the antisense strand (counting from the 5′-end of the antisense strand).

[0292] In one embodiment, B1 is 2′-OMe or 2′-F, n¹ is 8, T1 is 2′F, n² is 3, B2 is 2′-OMe, n³ is 7, n⁴ is 0, B3 is 2′OMe, n⁵ is 3, B1′ is 2′-OMe or 2′-F, q¹ is 9, T1′ is 2′-F, q² is 1, B2′ is 2′-OMe or 2′-F, q³ is 4, T2′ is 2′-F, q⁴ is 2, B3′ is 2′-OMe or 2′-F, q⁵ is 5, T3′ is 2′-F, q⁶ is 1, B4′ is 2′-OMe, and q⁷ is 1.

In one embodiment, B1 is 2′-OMe or 2′-F, n¹ is 8, T1 is 2′F, n² is 3, B2 is 2′-OMe, n³ is 7, n⁴ is 0, B3 is 2′-OMe, n⁵ is 3, B1′ is 2′-OMe or 2′-F, q¹ is 9, T1′ is 2′-F, q² is 1, B2′ is 2′-OMe or 2′-F, q³ is 4, T2′ is 2′-F, q⁴ is 2, B3′ is 2′-OMe or 2′-F, q⁵ is 5, T3′ is 2′-F, q⁶ is 1, B4′ is 2′-OMe, and q⁷ is 1; with two phosphorothioate internucleotide linkage modifications within positions 1-5 of the sense strand (counting from the 5′-end of the sense strand), and two phosphorothioate internucleotide linkage modifications at positions 1 and 2 and two phosphorothioate internucleotide linkage modifications within positions 18-23 of the antisense strand (counting from the 5′-end of the antisense strand).

[0293] In one embodiment, B1 is 2′-OMe or 2′-F, n¹ is 6, T1 is 2′F, n² is 3, B2 is 2′-OMe, n³ is 7, n⁴ is 0, B3 is 2′OMe, n⁵ is 3, B1′ is 2′-OMe or 2′-F, q¹ is 7, T1′ is 2′-F, q² is 1, B2′ is 2′-OMe or 2′-F, q³ is 4, T2′ is 2′-F, q⁴ is 2, B3′ is 2′-OMe or 2′-F, q⁵ is 5, T3′ is 2′-F, q⁶ is 1, B4′ is 2′-OMe, and q⁷ is 1.

In one embodiment, B1 is 2′-OMe or 2′-F, n¹ is 6, T1 is 2′F, n² is 3, B2 is 2′-OMe, n³ is 7, n⁴ is 0, B3 is 2′-OMe, n⁵ is 3, B1′ is 2′-OMe or 2′-F, q¹ is 7, T1′ is 2′-F, q² is 1, B2′ is 2′-OMe or 2′-F, q³ is 4, T2′ is 2′-F, q⁴ is 2, B3′ is 2′-OMe or 2′-F, q⁵ is 5, T3′ is 2′-F, q⁶ is 1, B4′ is 2′-OMe, and q⁷ is 1; with two phosphorothioate internucleotide linkage modifications within positions 1-5 of the sense strand (counting from the 5′-end of the sense strand), and two phosphorothioate internucleotide linkage modifications at positions 1 and 2 and two phosphorothioate internucleotide linkage modifications within positions 18-23 of the antisense strand (counting from the 5′-end of the antisense strand).

[0294] In one embodiment, B1 is 2′-OMe or 2′-F, n¹ is 8, T1 is 2′F, n² is 3, B2 is 2′-OMe, n³ is 7, n⁴ is 0, B3 is 2′OMe, n⁵ is 3, B1′ is 2′-OMe or 2′-F, q¹ is 9, T1′ is 2′-F, q² is 1, B2′ is 2′-OMe or 2′-F, q³ is 4, T2′ is 2′-F, q⁴ is 1, B3′ is 2′-OMe or 2′-F, q⁵ is 6, T3′ is 2′-F, q⁶ is 1, B4′ is 2′-OMe, and q⁷ is 1.

In one embodiment, B1 is 2′-OMe or 2′-F, n¹ is 8, T1 is 2′F, n² is 3, B2 is 2′-OMe, n³ is 7, n⁴ is 0, B3 is 2′-OMe, n⁵ is 3, B1′ is 2′-OMe or 2′-F, q¹ is 9, T1′ is 2′-F, q² is 1, B2′ is 2′-OMe or 2′-F, q³ is 4, T2′ is 2′-F, q⁴ is 1, B3′ is 2′-OMe or 2′-F, q⁵ is 6, T3′ is 2′-F, q⁶ is 1, B4′ is 2′-OMe, and q⁷ is 1; with two phosphorothioate internucleotide linkage modifications within positions 1-5 of the sense strand (counting from the 5′-end of the sense strand), and two phosphorothioate internucleotide linkage modifications at positions 1 and 2 and two phosphorothioate internucleotide linkage modifications within positions 18-23 of the antisense strand (counting from the 5′-end of the antisense strand).

[0295] In one embodiment, B1 is 2′-OMe or 2′-F, n¹ is 8, T1 is 2′F, n² is 3, B2 is 2′-OMe, n³ is 7, n⁴ is 0, B3 is 2′OMe, n⁵ is 3, B1′ is 2′-OMe or 2′-F, q¹ is 9, T1′ is 2′-F, q² is 1, B2′ is 2′-OMe or 2′-F, q³ is 5, T2′ is 2′-F, q⁴ is 1, B3′ is 2′-OMe or 2′-F, q⁵ is 5, T3′ is 2′-F, q⁶ is 1, B4′ is 2′-OMe, and q⁷ is 1; optionally with at least 2 additional TT at the 3′-end of the antisense strand.

In one embodiment, B1 is 2′-OMe or 2′-F, n¹ is 8, T1 is 2′F, n² is 3, B2 is 2′-OMe, n³ is 7, n⁴ is 0, B3 is 2′-OMe, n⁵ is 3, B1′ is 2′-OMe or 2′-F, q¹ is 9, T1′ is 2′-F, q² is 1, B2′ is 2′-OMe or 2′-F, q³ is 5, T2′ is 2′-F, q⁴ is 1, B3′ is 2′-OMe or 2′-F, q⁵ is 5, T3′ is 2′-F, q⁶ is 1, B4′ is 2′-OMe, and q⁷ is 1; optionally with at least 2 additional TT at the 3′-end of the antisense strand; with two phosphorothioate internucleotide linkage modifications within positions 1-5 of the sense strand (counting from the 5′-end of the sense strand), and two phosphorothioate internucleotide linkage modifications at positions 1 and 2 and two phosphorothioate internucleotide linkage modifications within positions 18-23 of the antisense strand (counting from the 5′-end of the antisense strand).

[0296] In one embodiment, B1 is 2′-OMe or 2′-F, n¹ is 8, T1 is 2′F, n² is 3, B2 is 2′-OMe, n³ is 7, n⁴ is 0, B3 is 2′-OMe, n⁵ is 3, B1′ is 2′-OMe or 2′-F, q¹ is 9, T1′ is 2′-F, q² is 1, B2′ is 2′-OMe or 2′-F, q³ is 4, q⁴ is 0, B3′ is 2′-OMe or 2′-F, q⁵ is 7, T3′ is 2′-F, q⁶ is 1, B4′ is 2′-OMe, and q⁷ is 1.

In one embodiment, B1 is 2′-OMe or 2′-F, n¹ is 8, T1 is 2′F, n² is 3, B2 is 2′-OMe, n³ is 7, n⁴ is 0, B3 is 2′-OMe, n⁵ is 3, B1′ is 2′-OMe or 2′-F, q¹ is 9, T1′ is 2′-F, q² is 1, B2′ is 2′-OMe or 2′-F, q³ is 4, q⁴ is 0, B3′ is 2′-OMe or 2′-F, q⁵ is 7, T3′ is 2′-F, q⁶ is 1, B4′ is 2′-OMe, and q⁷ is 1; with two phosphorothioate internucleotide linkage modifications within positions 1-5 of the sense strand (counting from the 5′-end), and two phosphorothioate internucleotide linkage modifications at positions 1 and 2 and two phosphorothioate internucleotide linkage modifications within positions 18-23 of the antisense strand (counting from the 5′-end).

[0297] In one embodiment, B1 is 2′-OMe or 2′-F, n¹ is 8, T1 is 2′F, n² is 3, B2 is 2′-OMe, n³ is 7, n⁴ is 0, B3 is 2′OMe, n⁵ is 3, B1′ is 2′-OMe or 2′-F, q¹ is 9, T1′ is 2′-F, q² is 1, B2′ is 2′-OMe or 2′-F, q³ is 4, T2′ is 2′-F, q⁴ is 2, B3′ is 2′-OMe or 2′-F, q⁵ is 5, T3′ is 2′-F, q⁶ is 1, B4′ is 2′-F, and q⁷ is 1.

In one embodiment, B1 is 2′-OMe or 2′-F, n¹ is 8, T1 is 2′F, n² is 3, B2 is 2′-OMe, n³ is 7, n⁴ is 0, B3 is 2′-OMe, n⁵ is 3, B1′ is 2′-OMe or 2′-F, q¹ is 9, T1′ is 2′-F, q² is 1, B2′ is 2′-OMe or 2′-F, q³ is 4, T2′ is 2′-F, q⁴ is 2, B3′ is 2′-OMe or 2′-F, q⁵ is 5, T3′ is 2′-F, q⁶ is 1, B4′ is 2′-F, and q⁷ is 1; with two phosphorothioate internucleotide linkage modifications within positions 1-5 of the sense strand (counting from the 5′-end of the sense strand), and two phosphorothioate internucleotide linkage modifications at positions 1 and 2 and two phosphorothioate internucleotide linkage modifications within positions 18-23 of the antisense strand (counting from the 5′-end of the antisense strand).

[0298] In one embodiment, B1 is 2′-OMe or 2′-F, n¹ is 8, T1 is 2′F, n² is 3, B2 is 2′-OMe, n³ is 7, n⁴ is 0, B3 is 2′-OMe, n⁵ is 3, B1′ is 2′-OMe or 2′-F, q¹ is 9, T1′ is 2′-F, q² is 1, B2′ is 2′-OMe or 2′-F, q³ is 4, q⁴ is 0, B3′ is 2′-OMe or 2′-F, q⁵ is 7, T3′ is 2′-F, q⁶ is 1, B4′ is 2′-F, and q⁷ is 1.

In one embodiment, B1 is 2′-OMe or 2′-F, n¹ is 8, T1 is 2′F, n² is 3, B2 is 2′-OMe, n³ is 7, n⁴ is 0, B3 is 2′-OMe, n⁵ is 3, B1′ is 2′-OMe or 2′-F, q¹ is 9, T1′ is 2′-F, q² is 1, B2′ is 2′-OMe or 2′-F, q³ is 4, q⁴ is 0, B3′ is 2′-OMe or 2′-F, q⁵ is 7, T3′ is 2′-F, q⁶ is 1, B4′ is 2′-F, and q⁷ is 1; with two phosphorothioate internucleotide linkage modifications within positions 1-5 of the sense strand (counting from the 5′-end of the sense strand), and two phosphorothioate internucleotide linkage modifications at positions 1 and 2 and two phosphorothioate internucleotide linkage modifications within positions 18-23 of the antisense strand (counting from the 5′-end of the antisense strand).

[0299] The RNAi agent can comprise a phosphorus-containing group at the 5′-end of the sense strand or antisense strand. The 5′-end phosphorus-containing group can be 5′-end phosphate (5′-P), 5′-end phosphorothioate (5′-PS), 5′-end phosphorodithioate (5′-PS2), 5′-end vinylphosphonate (5′-VP), 5′-end methylphosphonate (MePhos), or 5′-deoxy-5′-C-malonyl

[chemical structure]

When the 5′-end phosphorus-containing group is 5′-end vinylphosphonate (5′-VP), the 5′-VP can be either 5′-E-VP isomer (i.e., trans-vinylphosphate,

[chemical structure]

5′-Z-VP isomer (i.e., cis-vinylphosphate,

[chemical structure]

or mixtures thereof.
In one embodiment, the RNAi agent comprises a phosphorus-containing group at the 5′-end of the sense strand. In one embodiment, the RNAi agent comprises a phosphorus-containing group at the 5′-end of the antisense strand.

[0300] In one embodiment, the RNAi agent comprises a 5′-P. In one embodiment, the RNAi agent comprises a 5′-P in the antisense strand.

[0301] In one embodiment, the RNAi agent comprises a 5′-PS. In one embodiment, the RNAi agent comprises a 5′-PS in the antisense strand.

[0302] In one embodiment, the RNAi agent comprises a 5′-VP. In one embodiment, the RNAi agent comprises a 5′-VP in the antisense strand. In one embodiment, the RNAi agent comprises a 5′-E-VP in the antisense strand. In one embodiment, the RNAi agent comprises a 5′-Z-VP in the antisense strand.

[0303] In one embodiment, the RNAi agent comprises a 5′-PS2. In one embodiment, the RNAi agent comprises a 5′-PS2 in the antisense strand.

[0304] In one embodiment, the RNAi agent comprises a 5′-PS2. In one embodiment, the RNAi agent comprises a 5′-deoxy-5′-C-malonyl in the antisense strand.

[0305] In one embodiment, B1 is 2′-OMe or 2′-F, n¹ is 8, T1 is 2′F, n² is 3, B2 is 2′-OMe, n³ is 7, n⁴ is 0, B3 is 2′OMe, n⁵ is 3, B1′ is 2′-OMe or 2′-F, q¹ is 9, T1′ is 2′-F, q² is 1, B2′ is 2′-OMe or 2′-F, q³ is 4, T2′ is 2′-F, q⁴ is 2, B3′ is 2′-OMe or 2′-F, q⁵ is 5, T3′ is 2′-F, q⁶ is 1, B4′ is 2′-OMe, and q⁷ is 1. The RNAi agent also comprises a 5′-PS.

[0306] In one embodiment, B1 is 2′-OMe or 2′-F, n¹ is 8, T1 is 2′F, n² is 3, B2 is 2′-OMe, n³ is 7, n⁴ is 0, B3 is 2′OMe, n⁵ is 3, B1′ is 2′-OMe or 2′-F, q¹ is 9, T1′ is 2′-F, q² is 1, B2′ is 2′-OMe or 2′-F, q³ is 4, T2′ is 2′-F, q⁴ is 2, B3′ is 2′-OMe or 2′-F, q⁵ is 5, T3′ is 2′-F, q⁶ is 1, B4′ is 2′-OMe, and q⁷ is 1. The RNAi agent also comprises a 5′-P.

[0307] In one embodiment, B1 is 2′-OMe or 2′-F, n¹ is 8, T1 is 2′F, n² is 3, B2 is 2′-OMe, n³ is 7, n⁴ is 0, B3 is 2′OMe, n⁵ is 3, B1′ is 2′-OMe or 2′-F, q¹ is 9, T1′ is 2′-F, q² is 1, B2′ is 2′-OMe or 2′-F, q³ is 4, T2′ is 2′-F, q⁴ is 2, B3′ is 2′-OMe or 2′-F, q⁵ is 5, T3′ is 2′-F, q⁶ is 1, B4′ is 2′-OMe, and q⁷ is 1. The RNAi agent also comprises a 5′-VP. The 5′-VP may be 5′-E-VP, 5′-Z-VP, or combination thereof.

[0308] In one embodiment, B1 is 2′-OMe or 2′-F, n¹ is 8, T1 is 2′F, n² is 3, B2 is 2′-OMe, n³ is 7, n⁴ is 0, B3 is 2′OMe, n⁵ is 3, B1′ is 2′-OMe or 2′-F, q¹ is 9, T1′ is 2′-F, q² is 1, B2′ is 2′-OMe or 2′-F, q³ is 4, T2′ is 2′-F, q⁴ is 2, B3′ is 2′-OMe or 2′-F, q⁵ is 5, T3′ is 2′-F, q⁶ is 1, B4′ is 2′-OMe, and q⁷ is 1. The RNAi agent also comprises a 5′-PS2.

[0309] In one embodiment, B1 is 2′-OMe or 2′-F, n¹ is 8, T1 is 2′F, n² is 3, B2 is 2′-OMe, n³ is 7, n⁴ is 0, B3 is 2′OMe, n⁵ is 3, B1′ is 2′-OMe or 2′-F, q¹ is 9, T1′ is 2′-F, q² is 1, B2′ is 2′-OMe or 2′-F, q³ is 4, T2′ is 2′-F, q⁴ is 2, B3′ is 2′-OMe or 2′-F, q⁵ is 5, T3′ is 2′-F, q⁶ is 1, B4′ is 2′-OMe, and q⁷ is 1. The RNAi agent also comprises a 5′-deoxy-5′-C-malonyl.

[0310] In one embodiment, B1 is 2′-OMe or 2′-F, n¹ is 8, T1 is 2′F, n² is 3, B2 is 2′-OMe, n³ is 7, n⁴ is 0, B3 is 2′-OMe, n⁵ is 3, B1′ is 2′-OMe or 2′-F, q¹ is 9, T1′ is 2′-F, q² is 1, B2′ is 2′-OMe or 2′-F, q³ is 4, T2′ is 2′-F, q⁴ is 2, B3′ is 2′-OMe or 2′-F, q⁵ is 5, T3′ is 2′-F, q⁶ is 1, B4′ is 2′-OMe, and q⁷ is 1; with two phosphorothioate internucleotide linkage modifications within position 1-5 of the sense strand (counting from the 5′-end of the sense strand), and two phosphorothioate internucleotide linkage modifications at positions 1 and 2 and two phosphorothioate internucleotide linkage modifications within positions 18-23 of the antisense strand (counting from the 5′-end of the antisense strand). The RNAi agent also comprises a 5′-P.

[0311] In one embodiment, B1 is 2′-OMe or 2′-F, n¹ is 8, T1 is 2′F, n² is 3, B2 is 2′-OMe, n³ is 7, n⁴ is 0, B3 is 2′-OMe, n⁵ is 3, B1′ is 2′-OMe or 2′-F, q¹ is 9, T1′ is 2′-F, q² is 1, B2′ is 2′-OMe or 2′-F, q³ is 4, T2′ is 2′-F, q⁴ is 2, B3′ is 2′-OMe or 2′-F, q⁵ is 5, T3′ is 2′-F, q⁶ is 1, B4′ is 2′-OMe, and q⁷ is 1; with two phosphorothioate internucleotide linkage modifications within position 1-5 of the sense strand (counting from the 5′-end of the sense strand), and two phosphorothioate internucleotide linkage modifications at positions 1 and 2 and two phosphorothioate internucleotide linkage modifications within positions 18-23 of the antisense strand (counting from the 5′-end of the antisense strand). The RNAi agent also comprises a 5′-PS.

[0312] In one embodiment, B1 is 2′-OMe or 2′-F, n¹ is 8, T1 is 2′F, n² is 3, B2 is 2′-OMe, n³ is 7, n⁴ is 0, B3 is 2′-OMe, n⁵ is 3, B1′ is 2′-OMe or 2′-F, q¹ is 9, T1′ is 2′-F, q² is 1, B2′ is 2′-OMe or 2′-F, q³ is 4, T2′ is 2′-F, q⁴ is 2, B3′ is 2′-OMe or 2′-F, q⁵ is 5, T3′ is 2′-F, q⁶ is 1, B4′ is 2′-OMe, and q⁷ is 1; with two phosphorothioate internucleotide linkage modifications within position 1-5 of the sense strand (counting from the 5′-end of the sense strand), and two phosphorothioate internucleotide linkage modifications at positions 1 and 2 and two phosphorothioate internucleotide linkage modifications within positions 18-23 of the antisense strand (counting from the 5′-end of the antisense strand). The RNAi agent also comprises a 5′-VP. The 5′-VP may be 5′-E-VP, 5′-Z-VP, or combination thereof.

[0313] In one embodiment, B1 is 2′-OMe or 2′-F, n¹ is 8, T1 is 2′F, n² is 3, B2 is 2′-OMe, n³ is 7, n⁴ is 0, B3 is 2′-OMe, n⁵ is 3, B1′ is 2′-OMe or 2′-F, q¹ is 9, T1′ is 2′-F, q² is 1, B2′ is 2′-OMe or 2′-F, q³ is 4, T2′ is 2′-F, q⁴ is 2, B3′ is 2′-OMe or 2′-F, q⁵ is 5, T3′ is 2′-F, q⁶ is 1, B4′ is 2′-OMe, and q⁷ is 1; with two phosphorothioate internucleotide linkage modifications within position 1-5 of the sense strand (counting from the 5′-end of the sense strand), and two phosphorothioate internucleotide linkage modifications at positions 1 and 2 and two phosphorothioate internucleotide linkage modifications within positions 18-23 of the antisense strand (counting from the 5′-end of the antisense strand). The RNAi agent also comprises a 5′-PS2.

[0314] In one embodiment, B1 is 2′-OMe or 2′-F, n¹ is 8, T1 is 2′F, n² is 3, B2 is 2′-OMe, n³ is 7, n⁴ is 0, B3 is 2′-OMe, n⁵ is 3, B1′ is 2′-OMe or 2′-F, q¹ is 9, T1′ is 2′-F, q² is 1, B2′ is 2′-OMe or 2′-F, q³ is 4, T2′ is 2′-F, q⁴ is 2, B3′ is 2′-OMe or 2′-F, q⁵ is 5, T3′ is 2′-F, q⁶ is 1, B4′ is 2′-OMe, and q⁷ is 1; with two phosphorothioate internucleotide linkage modifications within position 1-5 of the sense strand (counting from the 5′-end of the sense strand), and two phosphorothioate internucleotide linkage modifications at positions 1 and 2 and two phosphorothioate internucleotide linkage modifications within positions 18-23 of the antisense strand (counting from the 5′-end of the antisense strand). The RNAi agent also comprises a 5′-deoxy-5′-C-malonyl.

[0315] In one embodiment, B1 is 2′-OMe or 2′-F, n¹ is 8, T1 is 2′F, n² is 3, B2 is 2′-OMe, n³ is 7, n⁴ is 0, B3 is 2′-OMe, n⁵ is 3, B1′ is 2′-OMe or 2′-F, q¹ is 9, T1′ is 2′-F, q² is 1, B2′ is 2′-OMe or 2′-F, q³ is 4, q⁴ is 0, B3′ is 2′-OMe or 2′-F, q⁵ is 7, T3′ is 2′-F, q⁶ is 1, B4′ is 2′-OMe, and q⁷ is 1. The RNAi agent also comprises a 5′-P.

[0316] In one embodiment, B1 is 2′-OMe or 2′-F, n¹ is 8, T1 is 2′F, n² is 3, B2 is 2′-OMe, n³ is 7, n⁴ is 0, B3 is 2′-OMe, n⁵ is 3, B1′ is 2′-OMe or 2′-F, q¹ is 9, T1′ is 2′-F, q² is 1, B2′ is 2′-OMe or 2′-F, q³ is 4, q⁴ is 0, B3′ is 2′-OMe or 2′-F, q⁵ is 7, T3′ is 2′-F, q⁶ is 1, B4′ is 2′-OMe, and q⁷ is 1. The dsRNA agent also comprises a 5′-PS.

[0317] In one embodiment, B1 is 2′-OMe or 2′-F, n¹ is 8, T1 is 2′F, n² is 3, B2 is 2′-OMe, n³ is 7, n⁴ is 0, B3 is 2′-OMe, n⁵ is 3, B1′ is 2′-OMe or 2′-F, q¹ is 9, T1′ is 2′-F, q² is 1, B2′ is 2′-OMe or 2′-F, q³ is 4, q⁴ is 0, B3′ is 2′-OMe or 2′-F, q⁵ is 7, T3′ is 2′-F, q⁶ is 1, B4′ is 2′-OMe, and q⁷ is 1. The RNAi agent also comprises a 5′-VP. The 5′-VP may be 5′-E-VP, 5′-Z-VP, or combination thereof.

[0318] In one embodiment, B1 is 2′-OMe or 2′-F, n¹ is 8, T1 is 2′F, n² is 3, B2 is 2′-OMe, n³ is 7, n⁴ is 0, B3 is 2′-OMe, n⁵ is 3, B1′ is 2′-OMe or 2′-F, q¹ is 9, T1′ is 2′-F, q² is 1, B2′ is 2′-OMe or 2′-F, q³ is 4, q⁴ is 0, B3′ is 2′-OMe or 2′-F, q⁵ is 7, T3′ is 2′-F, q⁶ is 1, B4′ is 2′-OMe, and q⁷ is 1. The RNAi agent also comprises a 5′-PS2.

[0319] In one embodiment, B1 is 2′-OMe or 2′-F, n¹ is 8, T1 is 2′F, n² is 3, B2 is 2′-OMe, n³ is 7, n⁴ is 0, B3 is 2′-OMe, n⁵ is 3, B1′ is 2′-OMe or 2′-F, q¹ is 9, T1′ is 2′-F, q² is 1, B2′ is 2′-OMe or 2′-F, q³ is 4, q⁴ is 0, B3′ is 2′-OMe or 2′-F, q⁵ is 7, T3′ is 2′-F, q⁶ is 1, B4′ is 2′-OMe, and q⁷ is 1. The RNAi agent also comprises a 5′-deoxy-5′-C-malonyl.

[0320] In one embodiment, B1 is 2′-OMe or 2′-F, n¹ is 8, T1 is 2′F, n² is 3, B2 is 2′-OMe, n³ is 7, n⁴ is 0, B3 is 2′-OMe, n⁵ is 3, B1′ is 2′-OMe or 2′-F, q¹ is 9, T1′ is 2′-F, q² is 1, B2′ is 2′-OMe or 2′-F, q³ is 4, q⁴ is 0, B3′ is 2′-OMe or 2′-F, q⁵ is 7, T3′ is 2′-F, q⁶ is 1, B4′ is 2′-OMe, and q⁷ is 1; with two phosphorothioate internucleotide linkage modifications within position 1-5 of the sense strand (counting from the 5′-end), and two phosphorothioate internucleotide linkage modifications at positions 1 and 2 and two phosphorothioate internucleotide linkage modifications within positions 18-23 of the antisense strand (counting from the 5′-end). The RNAi agent also comprises a 5′-P.

[0321] In one embodiment, B1 is 2′-OMe or 2′-F, n¹ is 8, T1 is 2′F, n² is 3, B2 is 2′-OMe, n³ is 7, n⁴ is 0, B3 is 2′-OMe, n⁵ is 3, B1′ is 2′-OMe or 2′-F, q¹ is 9, T1′ is 2′-F, q² is 1, B2′ is 2′-OMe or 2′-F, q³ is 4, q⁴ is 0, B3′ is 2′-OMe or 2′-F, q⁵ is 7, T3′ is 2′-F, q⁶ is 1, B4′ is 2′-OMe, and q⁷ is 1; with two phosphorothioate internucleotide linkage modifications within position 1-5 of the sense strand (counting from the 5′-end), and two phosphorothioate internucleotide linkage modifications at positions 1 and 2 and two phosphorothioate internucleotide linkage modifications within positions 18-23 of the antisense strand (counting from the 5′-end). The RNAi agent also comprises a 5′-PS.

[0322] In one embodiment, B1 is 2′-OMe or 2′-F, n¹ is 8, T1 is 2′F, n² is 3, B2 is 2′-OMe, n³ is 7, n⁴ is 0, B3 is 2′-OMe, n⁵ is 3, B1′ is 2′-OMe or 2′-F, q¹ is 9, T1′ is 2′-F, q² is 1, B2′ is 2′-OMe or 2′-F, q³ is 4, q⁴ is 0, B3′ is 2′-OMe or 2′-F, q⁵ is 7, T3′ is 2′-F, q⁶ is 1, B4′ is 2′-OMe, and q⁷ is 1; with two phosphorothioate internucleotide linkage modifications within position 1-5 of the sense strand (counting from the 5′-end), and two phosphorothioate internucleotide linkage modifications at positions 1 and 2 and two phosphorothioate internucleotide linkage modifications within positions 18-23 of the antisense strand (counting from the 5′-end). The RNAi agent also comprises a 5′-VP. The 5′-VP may be 5′-E-VP, 5′-Z-VP, or combination thereof.

[0323] In one embodiment, B1 is 2′-OMe or 2′-F, n¹ is 8, T1 is 2′F, n² is 3, B2 is 2′-OMe, n³ is 7, n⁴ is 0, B3 is 2′-OMe, n⁵ is 3, B1′ is 2′-OMe or 2′-F, q¹ is 9, T1′ is 2′-F, q² is 1, B2′ is 2′-OMe or 2′-F, q³ is 4, q⁴ is 0, B3′ is 2′-OMe or 2′-F, q⁵ is 7, T3′ is 2′-F, q⁶ is 1, B4′ is 2′-OMe, and q⁷ is 1; with two phosphorothioate internucleotide linkage modifications within position 1-5 of the sense strand (counting from the 5′-end), and two phosphorothioate internucleotide linkage modifications at positions 1 and 2 and two phosphorothioate internucleotide linkage modifications within positions 18-23 of the antisense strand (counting from the 5′-end). The RNAi agent also comprises a 5′-PS2.

[0324] In one embodiment, B1 is 2′-OMe or 2′-F, n¹ is 8, T1 is 2′F, n² is 3, B2 is 2′-OMe, n³ is 7, n⁴ is 0, B3 is 2′-OMe, n⁵ is 3, B1′ is 2′-OMe or 2′-F, q¹ is 9, T1′ is 2′-F, q² is 1, B2′ is 2′-OMe or 2′-F, q³ is 4, q⁴ is 0, B3′ is 2′-OMe or 2′-F, q⁵ is 7, T3′ is 2′-F, q⁶ is 1, B4′ is 2′-OMe, and q⁷ is 1; with two phosphorothioate internucleotide linkage modifications within position 1-5 of the sense strand (counting from the 5′-end), and two phosphorothioate internucleotide linkage modifications at positions 1 and 2 and two phosphorothioate internucleotide linkage modifications within positions 18-23 of the antisense strand (counting from the 5′-end). The RNAi agent also comprises a 5′-deoxy-5′-C-malonyl.

In one embodiment, B1 is 2′-OMe or 2′-F, n¹ is 8, T1 is 2′F, n² is 3, B2 is 2′-OMe, n³ is 7, n⁴ is 0, B3 is 2′OMe, n⁵ is 3, B1′ is 2′-OMe or 2′-F, q¹ is 9, T1′ is 2′-F, q² is 1, B2′ is 2′-OMe or 2′-F, q³ is 4, T2′ is 2′-F, q⁴ is 2, B3′ is 2′-OMe or 2′-F, q⁵ is 5, T3′ is 2′-F, q⁶ is 1, B4′ is 2′-F, and q⁷ is 1. The RNAi agent also comprises a 5′-P.

[0325] In one embodiment, B1 is 2′-OMe or 2′-F, n¹ is 8, T1 is 2′F, n² is 3, B2 is 2′-OMe, n³ is 7, n⁴ is 0, B3 is 2′OMe, n⁵ is 3, B1′ is 2′-OMe or 2′-F, q¹ is 9, T1′ is 2′-F, q² is 1, B2′ is 2′-OMe or 2′-F, q³ is 4, T2′ is 2′-F, q⁴ is 2, B3′ is 2′-OMe or 2′-F, q⁵ is 5, T3′ is 2′-F, q⁶ is 1, B4′ is 2′-F, and q⁷ is 1. The RNAi agent also comprises a 5′-PS.

[0326] In one embodiment, B1 is 2′-OMe or 2′-F, n¹ is 8, T1 is 2′F, n² is 3, B2 is 2′-OMe, n³ is 7, n⁴ is 0, B3 is 2′OMe, n⁵ is 3, B1′ is 2′-OMe or 2′-F, q¹ is 9, T1′ is 2′-F, q² is 1, B2′ is 2′-OMe or 2′-F, q³ is 4, T2′ is 2′-F, q⁴ is 2, B3′ is 2′-OMe or 2′-F, q⁵ is 5, T3′ is 2′-F, q⁶ is 1, B4′ is 2′-F, and q⁷ is 1. The RNAi agent also comprises a 5′-VP. The 5′-VP may be 5′-E-VP, 5′-Z-VP, or combination thereof.

[0327] In one embodiment, B1 is 2′-OMe or 2′-F, n¹ is 8, T1 is 2′F, n² is 3, B2 is 2′-OMe, n³ is 7, n⁴ is 0, B3 is 2′OMe, n⁵ is 3, B1′ is 2′-OMe or 2′-F, q¹ is 9, T1′ is 2′-F, q² is 1, B2′ is 2′-OMe or 2′-F, q³ is 4, T2′ is 2′-F, q⁴ is 2, B3′ is 2′-OMe or 2′-F, q⁵ is 5, T3′ is 2′-F, q⁶ is 1, B4′ is 2′-F, and q⁷ is 1. The dsRNAi RNA agent also comprises a 5′-PS₂.

[0328] In one embodiment, B1 is 2′-OMe or 2′-F, n¹ is 8, T1 is 2′F, n² is 3, B2 is 2′-OMe, n³ is 7, n⁴ is 0, B3 is 2′OMe, n⁵ is 3, B1′ is 2′-OMe or 2′-F, q¹ is 9, T1′ is 2′-F, q² is 1, B2′ is 2′-OMe or 2′-F, q³ is 4, T2′ is 2′-F, q⁴ is 2, B3′ is 2′-OMe or 2′-F, q⁵ is 5, T3′ is 2′-F, q⁶ is 1, B4′ is 2′-F, and q⁷ is 1. The RNAi agent also comprises a 5′-deoxy-5′-C-malonyl.

[0329] In one embodiment, B1 is 2′-OMe or 2′-F, n¹ is 8, T1 is 2′F, n² is 3, B2 is 2′-OMe, n³ is 7, n⁴ is 0, B3 is 2′-OMe, n⁵ is 3, B1′ is 2′-OMe or 2′-F, q¹ is 9, T1′ is 2′-F, q² is 1, B2′ is 2′-OMe or 2′-F, q³ is 4, T2′ is 2′-F, q⁴ is 2, B3′ is 2′-OMe or 2′-F, q⁵ is 5, T3′ is 2′-F, q⁶ is 1, B4′ is 2′-F, and q⁷ is 1; with two phosphorothioate internucleotide linkage modifications within position 1-5 of the sense strand (counting from the 5′-end of the sense strand), and two phosphorothioate internucleotide linkage modifications at positions 1 and 2 and two phosphorothioate internucleotide linkage modifications within positions 18-23 of the antisense strand (counting from the 5′-end of the antisense strand). The RNAi agent also comprises a 5′-P.

[0330] In one embodiment, B1 is 2′-OMe or 2′-F, n¹ is 8, T1 is 2′F, n² is 3, B2 is 2′-OMe, n³ is 7, n⁴ is 0, B3 is 2′-OMe, n⁵ is 3, B1′ is 2′-OMe or 2′-F, q¹ is 9, T1′ is 2′-F, q² is 1, B2′ is 2′-OMe or 2′-F, q³ is 4, T2′ is 2′-F, q⁴ is 2, B3′ is 2′-OMe or 2′-F, q⁵ is 5, T3′ is 2′-F, q⁶ is 1, B4′ is 2′-F, and q⁷ is 1; with two phosphorothioate internucleotide linkage modifications within position 1-5 of the sense strand (counting from the 5′-end of the sense strand), and two phosphorothioate internucleotide linkage modifications at positions 1 and 2 and two phosphorothioate internucleotide linkage modifications within positions 18-23 of the antisense strand (counting from the 5′-end of the antisense strand). The RNAi agent also comprises a 5′-PS.

[0331] In one embodiment, B1 is 2′-OMe or 2′-F, n¹ is 8, T1 is 2′F, n² is 3, B2 is 2′-OMe, n³ is 7, n⁴ is 0, B3 is 2′-OMe, n⁵ is 3, B1′ is 2′-OMe or 2′-F, q¹ is 9, T1′ is 2′-F, q² is 1, B2′ is 2′-OMe or 2′-F, q³ is 4, T2′ is 2′-F, q⁴ is 2, B3′ is 2′-OMe or 2′-F, q⁵ is 5, T3′ is 2′-F, q⁶ is 1, B4′ is 2′-F, and q⁷ is 1; with two phosphorothioate internucleotide linkage modifications within position 1-5 of the sense strand (counting from the 5′-end of the sense strand), and two phosphorothioate internucleotide linkage modifications at positions 1 and 2 and two phosphorothioate internucleotide linkage modifications within positions 18-23 of the antisense strand (counting from the 5′-end of the antisense strand). The RNAi agent also comprises a 5′-VP. The 5′-VP may be 5′-E-VP, 5′-Z-VP, or combination thereof.

[0332] In one embodiment, B1 is 2′-OMe or 2′-F, n¹ is 8, T1 is 2′F, n² is 3, B2 is 2′-OMe, n³ is 7, n⁴ is 0, B3 is 2′-OMe, n⁵ is 3, B1′ is 2′-OMe or 2′-F, q¹ is 9, T1′ is 2′-F, q² is 1, B2′ is 2′-OMe or 2′-F, q³ is 4, T2′ is 2′-F, q⁴ is 2, B3′ is 2′-OMe or 2′-F, q⁵ is 5, T3′ is 2′-F, q⁶ is 1, B4′ is 2′-F, and q⁷ is 1; with two phosphorothioate internucleotide linkage modifications within position 1-5 of the sense strand (counting from the 5′-end of the sense strand), and two phosphorothioate internucleotide linkage modifications at positions 1 and 2 and two phosphorothioate internucleotide linkage modifications within positions 18-23 of the antisense strand (counting from the 5′-end of the antisense strand). The RNAi agent also comprises a 5′-PS₂.

[0333] In one embodiment, B1 is 2′-OMe or 2′-F, n¹ is 8, T1 is 2′F, n² is 3, B2 is 2′-OMe, n³ is 7, n⁴ is 0, B3 is 2′-OMe, n⁵ is 3, B1′ is 2′-OMe or 2′-F, q¹ is 9, T1′ is 2′-F, q² is 1, B2′ is 2′-OMe or 2′-F, q³ is 4, T2′ is 2′-F, q⁴ is 2, B3′ is 2′-OMe or 2′-F, q⁵ is 5, T3′ is 2′-F, q⁶ is 1, B4′ is 2′-F, and q⁷ is 1; with two phosphorothioate internucleotide linkage modifications within position 1-5 of the sense strand (counting from the 5′-end of the sense strand), and two phosphorothioate internucleotide linkage modifications at positions 1 and 2 and two phosphorothioate internucleotide linkage modifications within positions 18-23 of the antisense strand (counting from the 5′-end of the antisense strand). The RNAi agent also comprises a 5′-deoxy-5′-C-malonyl.

[0334] In one embodiment, B1 is 2′-OMe or 2′-F, n¹ is 8, T1 is 2′F, n² is 3, B2 is 2′-OMe, n³ is 7, n⁴ is 0, B3 is 2′-OMe, n⁵ is 3, B1′ is 2′-OMe or 2′-F, q¹ is 9, T1′ is 2′-F, q² is 1, B2′ is 2′-OMe or 2′-F, q³ is 4, q⁴ is 0, B3′ is 2′-OMe or 2′-F, q⁵ is 7, T3′ is 2′-F, q⁶ is 1, B4′ is 2′-F, and q⁷ is 1. The RNAi agent also comprises a 5′-P.

[0335] In one embodiment, B1 is 2′-OMe or 2′-F, n¹ is 8, T1 is 2′F, n² is 3, B2 is 2′-OMe, n³ is 7, n⁴ is 0, B3 is 2′-OMe, n⁵ is 3, B1′ is 2′-OMe or 2′-F, q¹ is 9, T1′ is 2′-F, q² is 1, B2′ is 2′-OMe or 2′-F, q³ is 4, q⁴ is 0, B3′ is 2′-OMe or 2′-F, q⁵ is 7, T3′ is 2′-F, q⁶ is 1, B4′ is 2′-F, and q⁷ is 1. The RNAi agent also comprises a 5′-PS.

[0336] In one embodiment, B1 is 2′-OMe or 2′-F, n¹ is 8, T1 is 2′F, n² is 3, B2 is 2′-OMe, n³ is 7, n⁴ is 0, B3 is 2′-OMe, n⁵ is 3, B1′ is 2′-OMe or 2′-F, q¹ is 9, T1′ is 2′-F, q² is 1, B2′ is 2′-OMe or 2′-F, q³ is 4, q⁴ is 0, B3′ is 2′-OMe or 2′-F, q⁵ is 7, T3′ is 2′-F, q⁶ is 1, B4′ is 2′-F, and q⁷ is 1. The RNAi agent also comprises a 5′-VP. The 5′-VP may be 5′-E-VP, 5′-Z-VP, or combination thereof.

[0337] In one embodiment, B1 is 2′-OMe or 2′-F, n¹ is 8, T1 is 2′F, n² is 3, B2 is 2′-OMe, n³ is 7, n⁴ is 0, B3 is 2′-OMe, n⁵ is 3, B1′ is 2′-OMe or 2′-F, q¹ is 9, T1′ is 2′-F, q² is 1, B2′ is 2′-OMe or 2′-F, q³ is 4, q⁴ is 0, B3′ is 2′-OMe or 2′-F, q⁵ is 7, T3′ is 2′-F, q⁶ is 1, B4′ is 2′-F, and q⁷ is 1. The RNAi agent also comprises a 5′-PS₂.

[0338] In one embodiment, B1 is 2′-OMe or 2′-F, n¹ is 8, T1 is 2′F, n² is 3, B2 is 2′-OMe, n³ is 7, n⁴ is 0, B3 is 2′-OMe, n⁵ is 3, B1′ is 2′-OMe or 2′-F, q¹ is 9, T1′ is 2′-F, q² is 1, B2′ is 2′-OMe or 2′-F, q³ is 4, q⁴ is 0, B3′ is 2′-OMe or 2′-F, q⁵ is 7, T3′ is 2′-F, q⁶ is 1, B4′ is 2′-F, and q⁷ is 1. The RNAi agent also comprises a 5′-deoxy-5′-C-malonyl.

[0339] In one embodiment, B1 is 2′-OMe or 2′-F, n¹ is 8, T1 is 2′F, n² is 3, B2 is 2′-OMe, n³ is 7, n⁴ is 0, B3 is 2′-OMe, n⁵ is 3, B1′ is 2′-OMe or 2′-F, q¹ is 9, T1′ is 2′-F, q² is 1, B2′ is 2′-OMe or 2′-F, q³ is 4, q⁴ is 0, B3′ is 2′-OMe or 2′-F, q⁵ is 7, T3′ is 2′-F, q⁶ is 1, B4′ is 2′-F, and q⁷ is 1; with two phosphorothioate internucleotide linkage modifications within position 1-5 of the sense strand (counting from the 5′-end of the sense strand), and two phosphorothioate internucleotide linkage modifications at positions 1 and 2 and two phosphorothioate internucleotide linkage modifications within positions 18-23 of the antisense strand (counting from the 5′-end of the antisense strand). The RNAi agent also comprises a 5′-P.

[0340] In one embodiment, B1 is 2′-OMe or 2′-F, n¹ is 8, T1 is 2′F, n² is 3, B2 is 2′-OMe, n³ is 7, n⁴ is 0, B3 is 2′-OMe, n⁵ is 3, B1′ is 2′-OMe or 2′-F, q¹ is 9, T1′ is 2′-F, q² is 1, B2′ is 2′-OMe or 2′-F, q³ is 4, q⁴ is 0, B3′ is 2′-OMe or 2′-F, q⁵ is 7, T3′ is 2′-F, q⁶ is 1, B4′ is 2′-F, and q⁷ is 1; with two phosphorothioate internucleotide linkage modifications within position 1-5 of the sense strand (counting from the 5′-end of the sense strand), and two phosphorothioate internucleotide linkage modifications at positions 1 and 2 and two phosphorothioate internucleotide linkage modifications within positions 18-23 of the antisense strand (counting from the 5′-end of the antisense strand). The RNAi agent also comprises a 5′-PS.

[0341] In one embodiment, B1 is 2′-OMe or 2′-F, n¹ is 8, T1 is 2′F, n² is 3, B2 is 2′-OMe, n³ is 7, n⁴ is 0, B3 is 2′-OMe, n⁵ is 3, B1′ is 2′-OMe or 2′-F, q¹ is 9, T1′ is 2′-F, q² is 1, B2′ is 2′-OMe or 2′-F, q³ is 4, q⁴ is 0, B3′ is 2′-OMe or 2′-F, q⁵ is 7, T3′ is 2′-F, q⁶ is 1, B4′ is 2′-F, and q⁷ is 1; with two phosphorothioate internucleotide linkage modifications within position 1-5 of the sense strand (counting from the 5′-end of the sense strand), and two phosphorothioate internucleotide linkage modifications at positions 1 and 2 and two phosphorothioate internucleotide linkage modifications within positions 18-23 of the antisense strand (counting from the 5′-end of the antisense strand). The RNAi agent also comprises a 5′-VP. The 5′-VP may be 5′-E-VP, 5′-Z-VP, or combination thereof.

[0342] In one embodiment, B1 is 2′-OMe or 2′-F, n¹ is 8, T1 is 2′F, n² is 3, B2 is 2′-OMe, n³ is 7, n⁴ is 0, B3 is 2′-OMe, n⁵ is 3, B1′ is 2′-OMe or 2′-F, q¹ is 9, T1′ is 2′-F, q² is 1, B2′ is 2′-OMe or 2′-F, q³ is 4, q⁴ is 0, B3′ is 2′-OMe or 2′-F, q⁵ is 7, T3′ is 2′-F, q⁶ is 1, B4′ is 2′-F, and q⁷ is 1; with two phosphorothioate internucleotide linkage modifications within position 1-5 of the sense strand (counting from the 5′-end of the sense strand), and two phosphorothioate internucleotide linkage modifications at positions 1 and 2 and two phosphorothioate internucleotide linkage modifications within positions 18-23 of the antisense strand (counting from the 5′-end of the antisense strand). The RNAi agent also comprises a 5′-PS₂.

[0343] In one embodiment, B1 is 2′-OMe or 2′-F, n¹ is 8, T1 is 2′F, n² is 3, B2 is 2′-OMe, n³ is 7, n⁴ is 0, B3 is 2′-OMe, n⁵ is 3, B1′ is 2′-OMe or 2′-F, q¹ is 9, T1′ is 2′-F, q² is 1, B2′ is 2′-OMe or 2′-F, q³ is 4, q⁴ is 0, B3′ is 2′-OMe or 2′-F, q⁵ is 7, T3′ is 2′-F, q⁶ is 1, B4′ is 2′-F, and q⁷ is 1; with two phosphorothioate internucleotide linkage modifications within position 1-5 of the sense strand (counting from the 5′-end of the sense strand), and two phosphorothioate internucleotide linkage modifications at positions 1 and 2 and two phosphorothioate internucleotide linkage modifications within positions 18-23 of the antisense strand (counting from the 5′-end of the antisense strand). The RNAi agent also comprises a 5′-deoxy-5′-C-malonyl.

[0344] In one embodiment, B1 is 2′-OMe or 2′-F, n¹ is 8, T1 is 2′F, n² is 3, B2 is 2′-OMe, n³ is 7, n⁴ is 0, B3 is 2′-OMe, n⁵ is 3, B1′ is 2′-OMe or 2′-F, q¹ is 9, T1′ is 2′-F, q² is 1, B2′ is 2′-OMe or 2′-F, q³ is 4, T2′ is 2′-F, q⁴ is 2, B3′ is 2′-OMe or 2′-F, q⁵ is 5, T3′ is 2′-F, q⁶ is 1, B4′ is 2′-OMe, and q⁷ is 1; with two phosphorothioate internucleotide linkage modifications within position 1-5 of the sense strand (counting from the 5′-end of the sense strand), and two phosphorothioate internucleotide linkage modifications at positions 1 and 2 and two phosphorothioate internucleotide linkage modifications within positions 18-23 of the antisense strand (counting from the 5′-end of the antisense strand). The RNAi agent also comprises a 5′-P and a targeting ligand. In one embodiment, the 5′-P is at the 5′-end of the antisense strand, and the targeting ligand is at the 3′-end of the sense strand.

[0345] In one embodiment, B1 is 2′-OMe or 2′-F, n¹ is 8, T1 is 2′F, n² is 3, B2 is 2′-OMe, n³ is 7, n⁴ is 0, B3 is 2′-OMe, n⁵ is 3, B1′ is 2′-OMe or 2′-F, q¹ is 9, T1′ is 2′-F, q² is 1, B2′ is 2′-OMe or 2′-F, q³ is 4, T2′ is 2′-F, q⁴ is 2, B3′ is 2′-OMe or 2′-F, q⁵ is 5, T3′ is 2′-F, q⁶ is 1, B4′ is 2′-OMe, and q⁷ is 1; with two phosphorothioate internucleotide linkage modifications within position 1-5 of the sense strand (counting from the 5′-end of the sense strand), and two phosphorothioate internucleotide linkage modifications at positions 1 and 2 and two phosphorothioate internucleotide linkage modifications within positions 18-23 of the antisense strand (counting from the 5′-end of the antisense strand). The RNAi agent also comprises a 5′-PS and a targeting ligand. In one embodiment, the 5′-PS is at the 5′-end of the antisense strand, and the targeting ligand is at the 3′-end of the sense strand.

[0346] In one embodiment, B1 is 2′-OMe or 2′-F, n¹ is 8, T1 is 2′F, n² is 3, B2 is 2′-OMe, n³ is 7, n⁴ is 0, B3 is 2′-OMe, n⁵ is 3, B1′ is 2′-OMe or 2′-F, q¹ is 9, T1′ is 2′-F, q² is 1, B2′ is 2′-OMe or 2′-F, q³ is 4, T2′ is 2′-F, q⁴ is 2, B3′ is 2′-OMe or 2′-F, q⁵ is 5, T3′ is 2′-F, q⁶ is 1, B4′ is 2′-OMe, and q⁷ is 1; with two phosphorothioate internucleotide linkage modifications within position 1-5 of the sense strand (counting from the 5′-end of the sense strand), and two phosphorothioate internucleotide linkage modifications at positions 1 and 2 and two phosphorothioate internucleotide linkage modifications within positions 18-23 of the antisense strand (counting from the 5′-end of the antisense strand). The RNAi agent also comprises a 5′-VP (e.g., a 5′-E-VP, 5′-Z-VP, or combination thereof), and a targeting ligand.

[0347] In one embodiment, the 5′-VP is at the 5′-end of the antisense strand, and the targeting ligand is at the 3′-end of the sense strand.

[0348] In one embodiment, B1 is 2′-OMe or 2′-F, n¹ is 8, T1 is 2′F, n² is 3, B2 is 2′-OMe, n³ is 7, n⁴ is 0, B3 is 2′-OMe, n⁵ is 3, B1′ is 2′-OMe or 2′-F, q¹ is 9, T1′ is 2′-F, q² is 1, B2′ is 2′-OMe or 2′-F, q³ is 4, T2′ is 2′-F, q⁴ is 2, B3′ is 2′-OMe or 2′-F, q⁵ is 5, T3′ is 2′-F, q⁶ is 1, B4′ is 2′-OMe, and q⁷ is 1; with two phosphorothioate internucleotide linkage modifications within position 1-5 of the sense strand (counting from the 5′-end of the sense strand), and two phosphorothioate internucleotide linkage modifications at positions 1 and 2 and two phosphorothioate internucleotide linkage modifications within positions 18-23 of the antisense strand (counting from the 5′-end of the antisense strand). The RNAi agent also comprises a 5′-PS₂ and a targeting ligand. In one embodiment, the 5′-PS₂ is at the 5′-end of the antisense strand, and the targeting ligand is at the 3′-end of the sense strand.

[0349] In one embodiment, B1 is 2′-OMe or 2′-F, n¹ is 8, T1 is 2′F, n² is 3, B2 is 2′-OMe, n³ is 7, n⁴ is 0, B3 is 2′-OMe, n⁵ is 3, B1′ is 2′-OMe or 2′-F, q¹ is 9, T1′ is 2′-F, q² is 1, B2′ is 2′-OMe or 2′-F, q³ is 4, T2′ is 2′-F, q⁴ is 2, B3′ is 2′-OMe or 2′-F, q⁵ is 5, T3′ is 2′-F, q⁶ is 1, B4′ is 2′-OMe, and q⁷ is 1; with two phosphorothioate internucleotide linkage modifications within position 1-5 of the sense strand (counting from the 5′-end of the sense strand), and two phosphorothioate internucleotide linkage modifications at positions 1 and 2 and two phosphorothioate internucleotide linkage modifications within positions 18-23 of the antisense strand (counting from the 5′-end of the antisense strand). The RNAi agent also comprises a 5′-deoxy-5′-C-malonyl and a targeting ligand. In one embodiment, the 5′-deoxy-5′-C-malonyl is at the 5′-end of the antisense strand, and the targeting ligand is at the 3′-end of the sense strand.

[0350] In one embodiment, B1 is 2′-OMe or 2′-F, n¹ is 8, T1 is 2′F, n² is 3, B2 is 2′-OMe, n³ is 7, n⁴ is 0, B3 is 2′-OMe, n⁵ is 3, B1′ is 2′-OMe or 2′-F, q¹ is 9, T1′ is 2′-F, q² is 1, B2′ is 2′-OMe or 2′-F, q³ is 4, q⁴ is 0, B3′ is 2′-OMe or 2′-F, q⁵ is 7, T3′ is 2′-F, q⁶ is 1, B4′ is 2′-OMe, and q⁷ is 1; with two phosphorothioate internucleotide linkage modifications within position 1-5 of the sense strand (counting from the 5′-end), and two phosphorothioate internucleotide linkage modifications at positions 1 and 2 and two phosphorothioate internucleotide linkage modifications within positions 18-23 of the antisense strand (counting from the 5′-end). The RNAi agent also comprises a 5′-P and a targeting ligand. In one embodiment, the 5′-P is at the 5′-end of the antisense strand, and the targeting ligand is at the 3′-end of the sense strand.

[0351] In one embodiment, B1 is 2′-OMe or 2′-F, n¹ is 8, T1 is 2′F, n² is 3, B2 is 2′-OMe, n³ is 7, n⁴ is 0, B3 is 2′-OMe, n⁵ is 3, B1′ is 2′-OMe or 2′-F, q¹ is 9, T1′ is 2′-F, q² is 1, B2′ is 2′-OMe or 2′-F, q³ is 4, q⁴ is 0, B3′ is 2′-OMe or 2′-F, q⁵ is 7, T3′ is 2′-F, q⁶ is 1, B4′ is 2′-OMe, and q⁷ is 1; with two phosphorothioate internucleotide linkage modifications within position 1-5 of the sense strand (counting from the 5′-end), and two phosphorothioate internucleotide linkage modifications at positions 1 and 2 and two phosphorothioate internucleotide linkage modifications within positions 18-23 of the antisense strand (counting from the 5′-end). The RNAi agent also comprises a 5′-PS and a targeting ligand. In one embodiment, the 5′-PS is at the 5′-end of the antisense strand, and the targeting ligand is at the 3′-end of the sense strand.

[0352] In one embodiment, B1 is 2′-OMe or 2′-F, n¹ is 8, T1 is 2′F, n² is 3, B2 is 2′-OMe, n³ is 7, n⁴ is 0, B3 is 2′-OMe, n⁵ is 3, B1′ is 2′-OMe or 2′-F, q¹ is 9, T1′ is 2′-F, q² is 1, B2′ is 2′-OMe or 2′-F, q³ is 4, q⁴ is 0, B3′ is 2′-OMe or 2′-F, q⁵ is 7, T3′ is 2′-F, q⁶ is 1, B4′ is 2′-OMe, and q⁷ is 1; with two phosphorothioate internucleotide linkage modifications within position 1-5 of the sense strand (counting from the 5′-end), and two phosphorothioate internucleotide linkage modifications at positions 1 and 2 and two phosphorothioate internucleotide linkage modifications within positions 18-23 of the antisense strand (counting from the 5′-end). The RNAi agent also comprises a 5′-VP (e.g., a 5′-E-VP, 5′-Z-VP, or combination thereof) and a targeting ligand. In one embodiment, the 5′-VP is at the 5′-end of the antisense strand, and the targeting ligand is at the 3′-end of the sense strand.

[0353] In one embodiment, B1 is 2′-OMe or 2′-F, n¹ is 8, T1 is 2′F, n² is 3, B2 is 2′-OMe, n³ is 7, n⁴ is 0, B3 is 2′-OMe, n⁵ is 3, B1′ is 2′-OMe or 2′-F, q¹ is 9, T1′ is 2′-F, q² is 1, B2′ is 2′-OMe or 2′-F, q³ is 4, q⁴ is 0, B3′ is 2′-OMe or 2′-F, q⁵ is 7, T3′ is 2′-F, q⁶ is 1, B4′ is 2′-OMe, and q⁷ is 1; with two phosphorothioate internucleotide linkage modifications within position 1-5 of the sense strand (counting from the 5′-end), and two phosphorothioate internucleotide linkage modifications at positions 1 and 2 and two phosphorothioate internucleotide linkage modifications within positions 18-23 of the antisense strand (counting from the 5′-end). The RNAi agent also comprises a 5′-PS₂ and a targeting ligand. In one embodiment, the 5′-PS₂ is at the 5′-end of the antisense strand, and the targeting ligand is at the 3′-end of the sense strand.

[0354] In one embodiment, B1 is 2′-OMe or 2′-F, n¹ is 8, T1 is 2′F, n² is 3, B2 is 2′-OMe, n³ is 7, n⁴ is 0, B3 is 2′-OMe, n⁵ is 3, B1′ is 2′-OMe or 2′-F, q¹ is 9, T1′ is 2′-F, q² is 1, B2′ is 2′-OMe or 2′-F, q³ is 4, q⁴ is 0, B3′ is 2′-OMe or 2′-F, q⁵ is 7, T3′ is 2′-F, q⁶ is 1, B4′ is 2′-OMe, and q⁷ is 1; with two phosphorothioate internucleotide linkage modifications within position 1-5 of the sense strand (counting from the 5′-end), and two phosphorothioate internucleotide linkage modifications at positions 1 and 2 and two phosphorothioate internucleotide linkage modifications within positions 18-23 of the antisense strand (counting from the 5′-end). The RNAi agent also comprises a 5′-deoxy-5′-C-malonyl and a targeting ligand. In one embodiment, the 5′-deoxy-5′-C-malonyl is at the 5′-end of the antisense strand, and the targeting ligand is at the 3′-end of the sense strand.

[0355] In one embodiment, B1 is 2′-OMe or 2′-F, n¹ is 8, T1 is 2′F, n² is 3, B2 is 2′-OMe, n³ is 7, n⁴ is 0, B3 is 2′-OMe, n⁵ is 3, B1′ is 2′-OMe or 2′-F, q¹ is 9, T1′ is 2′-F, q² is 1, B2′ is 2′-OMe or 2′-F, q³ is 4, T2′ is 2′-F, q⁴ is 2, B3′ is 2′-OMe or 2′-F, q⁵ is 5, T3′ is 2′-F, q⁶ is 1, B4′ is 2′-F, and q⁷ is 1; with two phosphorothioate internucleotide linkage modifications within position 1-5 of the sense strand (counting from the 5′-end of the sense strand), and two phosphorothioate internucleotide linkage modifications at positions 1 and 2 and two phosphorothioate internucleotide linkage modifications within positions 18-23 of the antisense strand (counting from the 5′-end of the antisense strand). The RNAi agent also comprises a 5′-P and a targeting ligand. In one embodiment, the 5′-P is at the 5′-end of the antisense strand, and the targeting ligand is at the 3′-end of the sense strand.

[0356] In one embodiment, B1 is 2′-OMe or 2′-F, n¹ is 8, T1 is 2′F, n² is 3, B2 is 2′-OMe, n³ is 7, n⁴ is 0, B3 is 2′-OMe, n⁵ is 3, B1′ is 2′-OMe or 2′-F, q¹ is 9, T1′ is 2′-F, q² is 1, B2′ is 2′-OMe or 2′-F, q³ is 4, T2′ is 2′-F, q⁴ is 2, B3′ is 2′-OMe or 2′-F, q⁵ is 5, T3′ is 2′-F, q⁶ is 1, B4′ is 2′-F, and q⁷ is 1; with two phosphorothioate internucleotide linkage modifications within position 1-5 of the sense strand (counting from the 5′-end of the sense strand), and two phosphorothioate internucleotide linkage modifications at positions 1 and 2 and two phosphorothioate internucleotide linkage modifications within positions 18-23 of the antisense strand (counting from the 5′-end of the antisense strand). The RNAi agent also comprises a 5′-PS and a targeting ligand. In one embodiment, the 5′-PS is at the 5′-end of the antisense strand, and the targeting ligand is at the 3′-end of the sense strand.

[0357] In one embodiment, B1 is 2′-OMe or 2′-F, n¹ is 8, T1 is 2′F, n² is 3, B2 is 2′-OMe, n³ is 7, n⁴ is 0, B3 is 2′-OMe, n⁵ is 3, B1′ is 2′-OMe or 2′-F, q¹ is 9, T1′ is 2′-F, q² is 1, B2′ is 2′-OMe or 2′-F, q³ is 4, T2′ is 2′-F, q⁴ is 2, B3′ is 2′-OMe or 2′-F, q⁵ is 5, T3′ is 2′-F, q⁶ is 1, B4′ is 2′-F, and q⁷ is 1; with two phosphorothioate internucleotide linkage modifications within position 1-5 of the sense strand (counting from the 5′-end of the sense strand), and two phosphorothioate internucleotide linkage modifications at positions 1 and 2 and two phosphorothioate internucleotide linkage modifications within positions 18-23 of the antisense strand (counting from the 5′-end of the antisense strand). The RNAi agent also comprises a 5′-VP (e.g., a 5′-E-VP, 5′-Z-VP, or combination thereof) and a targeting ligand. In one embodiment, the 5′-VP is at the 5′-end of the antisense strand, and the targeting ligand is at the 3′-end of the sense strand.

[0358] In one embodiment, B1 is 2′-OMe or 2′-F, n¹ is 8, T1 is 2′F, n² is 3, B2 is 2′-OMe, n³ is 7, n⁴ is 0, B3 is 2′-OMe, n⁵ is 3, B1′ is 2′-OMe or 2′-F, q¹ is 9, T1′ is 2′-F, q² is 1, B2′ is 2′-OMe or 2′-F, q³ is 4, T2′ is 2′-F, q⁴ is 2, B3′ is 2′-OMe or 2′-F, q⁵ is 5, T3′ is 2′-F, q⁶ is 1, B4′ is 2′-F, and q⁷ is 1; with two phosphorothioate internucleotide linkage modifications within position 1-5 of the sense strand (counting from the 5′-end of the sense strand), and two phosphorothioate internucleotide linkage modifications at positions 1 and 2 and two phosphorothioate internucleotide linkage modifications within positions 18-23 of the antisense strand (counting from the 5′-end of the antisense strand). The RNAi agent also comprises a 5′-PS₂ and a targeting ligand. In one embodiment, the 5′-PS₂ is at the 5′-end of the antisense strand, and the targeting ligand is at the 3′-end of the sense strand. In one embodiment, B1 is 2′-OMe or 2′-F, n¹ is 8, T1 is 2′F, n² is 3, B2 is 2′-OMe, n³ is 7, n⁴ is 0, B3 is 2′-OMe, n⁵ is 3, B1′ is 2′-OMe or 2′-F, q¹ is 9, T1′ is 2′-F, q² is 1, B2′ is 2′-OMe or 2′-F, q³ is 4, T2′ is 2′-F, q⁴ is 2, B3′ is 2′-OMe or 2′-F, q⁵ is 5, T3′ is 2′-F, q⁶ is 1, B4′ is 2′-F, and q⁷ is 1; with two phosphorothioate internucleotide linkage modifications within position 1-5 of the sense strand (counting from the 5′-end of the sense strand), and two phosphorothioate internucleotide linkage modifications at positions 1 and 2 and two phosphorothioate internucleotide linkage modifications within positions 18-23 of the antisense strand (counting from the 5′-end of the antisense strand). The RNAi agent also comprises a 5′-deoxy-5′-C-malonyl and a targeting ligand. In one embodiment, the 5′-deoxy-5′-C-malonyl is at the 5′-end of the antisense strand, and the targeting ligand is at the 3′-end of the sense strand.

[0359] In one embodiment, B1 is 2′-OMe or 2′-F, n¹ is 8, T1 is 2′F, n² is 3, B2 is 2′-OMe, n³ is 7, n⁴ is 0, B3 is 2′-OMe, n⁵ is 3, B1′ is 2′-OMe or 2′-F, q¹ is 9, T1′ is 2′-F, q² is 1, B2′ is 2′-OMe or 2′-F, q³ is 4, q⁴ is 0, B3′ is 2′-OMe or 2′-F, q⁵ is 7, T3′ is 2′-F, q⁶ is 1, B4′ is 2′-F, and q⁷ is 1; with two phosphorothioate internucleotide linkage modifications within position 1-5 of the sense strand (counting from the 5′-end of the sense strand), and two phosphorothioate internucleotide linkage modifications at positions 1 and 2 and two phosphorothioate internucleotide linkage modifications within positions 18-23 of the antisense strand (counting from the 5′-end of the antisense strand). The RNAi agent also comprises a 5′-P and a targeting ligand. In one embodiment, the 5′-P is at the 5′-end of the antisense strand, and the targeting ligand is at the 3′-end of the sense strand.

[0360] In one embodiment, B1 is 2′-OMe or 2′-F, n¹ is 8, T1 is 2′F, n² is 3, B2 is 2′-OMe, n³ is 7, n⁴ is 0, B3 is 2′-OMe, n⁵ is 3, B1′ is 2′-OMe or 2′-F, q¹ is 9, T1′ is 2′-F, q² is 1, B2′ is 2′-OMe or 2′-F, q³ is 4, q⁴ is 0, B3′ is 2′-OMe or 2′-F, q⁵ is 7, T3′ is 2′-F, q⁶ is 1, B4′ is 2′-F, and q⁷ is 1; with two phosphorothioate internucleotide linkage modifications within position 1-5 of the sense strand (counting from the 5′-end of the sense strand), and two phosphorothioate internucleotide linkage modifications at positions 1 and 2 and two phosphorothioate internucleotide linkage modifications within positions 18-23 of the antisense strand (counting from the 5′-end of the antisense strand). The RNAi agent also comprises a 5′-PS and a targeting ligand. In one embodiment, the 5′-PS is at the 5′-end of the antisense strand, and the targeting ligand is at the 3′-end of the sense strand.

[0361] In one embodiment, B1 is 2′-OMe or 2′-F, n¹ is 8, T1 is 2′F, n² is 3, B2 is 2′-OMe, n³ is 7, n⁴ is 0, B3 is 2′-OMe, n⁵ is 3, B1′ is 2′-OMe or 2′-F, q¹ is 9, T1′ is 2′-F, q² is 1, B2′ is 2′-OMe or 2′-F, q³ is 4, q⁴ is 0, B3′ is 2′-OMe or 2′-F, q⁵ is 7, T3′ is 2′-F, q⁶ is 1, B4′ is 2′-F, and q⁷ is 1; with two phosphorothioate internucleotide linkage modifications within position 1-5 of the sense strand (counting from the 5′-end of the sense strand), and two phosphorothioate internucleotide linkage modifications at positions 1 and 2 and two phosphorothioate internucleotide linkage modifications within positions 18-23 of the antisense strand (counting from the 5′-end of the antisense strand). The RNAi agent also comprises a 5′-VP (e.g., a 5′-E-VP, 5′-Z-VP, or combination thereof) and a targeting ligand. In one embodiment, the 5′-VP is at the 5′-end of the antisense strand, and the targeting ligand is at the 3′-end of the sense strand.

[0362] In one embodiment, B1 is 2′-OMe or 2′-F, n¹ is 8, T1 is 2′F, n² is 3, B2 is 2′-OMe, n³ is 7, n⁴ is 0, B3 is 2′-OMe, n⁵ is 3, B1′ is 2′-OMe or 2′-F, q¹ is 9, T1′ is 2′-F, q² is 1, B2′ is 2′-OMe or 2′-F, q³ is 4, q⁴ is 0, B3′ is 2′-OMe or 2′-F, q⁵ is 7, T3′ is 2′-F, q⁶ is 1, B4′ is 2′-F, and q⁷ is 1; with two phosphorothioate internucleotide linkage modifications within position 1-5 of the sense strand (counting from the 5′-end of the sense strand), and two phosphorothioate internucleotide linkage modifications at positions 1 and 2 and two phosphorothioate internucleotide linkage modifications within positions 18-23 of the antisense strand (counting from the 5′-end of the antisense strand). The RNAi agent also comprises a 5′-PS₂ and a targeting ligand. In one embodiment, the 5′-PS₂ is at the 5′-end of the antisense strand, and the targeting ligand is at the 3′-end of the sense strand.

[0363] In one embodiment, B1 is 2′-OMe or 2′-F, n¹ is 8, T1 is 2′F, n² is 3, B2 is 2′-OMe, n³ is 7, n⁴ is 0, B3 is 2′-OMe, n⁵ is 3, B1′ is 2′-OMe or 2′-F, q¹ is 9, T1′ is 2′-F, q² is 1, B2′ is 2′-OMe or 2′-F, q³ is 4, q⁴ is 0, B3′ is 2′-OMe or 2′-F, q⁵ is 7, T3′ is 2′-F, q⁶ is 1, B4′ is 2′-F, and q⁷ is 1; with two phosphorothioate internucleotide linkage modifications within position 1-5 of the sense strand (counting from the 5′-end of the sense strand), and two phosphorothioate internucleotide linkage modifications at positions 1 and 2 and two phosphorothioate internucleotide linkage modifications within positions 18-23 of the antisense strand (counting from the 5′-end of the antisense strand). The RNAi agent also comprises a 5′-deoxy-5′-C-malonyl and a targeting ligand. In one embodiment, the 5′-deoxy-5′-C-malonyl is at the 5′-end of the antisense strand, and the targeting ligand is at the 3′-end of the sense strand.

[0364] In a particular embodiment, an RNAi agent of the present invention comprises:
[0365] (a) a sense strand having:
   [0366] (i) a length of 21 nucleotides;
   [0367] (ii) an ASGPR ligand attached to the 3′-end, wherein said ASGPR ligand comprises three GalNAc derivatives attached through a trivalent branched linker; and
   [0368] (iii) 2′-F modifications at positions 1, 3, 5, 7, 9 to 11, 13, 17, 19, and 21, and 2′-OMe modifications at positions 2, 4, 6, 8, 12, 14 to 16, 18, and 20 (counting from the 5′ end);
[0369] and
[0370] (b) an antisense strand having:
   [0371] (i) a length of 23 nucleotides;
   [0372] (ii) 2′-OMe modifications at positions 1, 3, 5, 9, 11 to 13, 15, 17, 19, 21, and 23, and 2′F modifications at positions 2, 4, 6 to 8, 10, 14, 16, 18, 20, and 22 (counting from the 5′ end); and
   [0373] (iii) phosphorothioate internucleotide linkages between nucleotide positions 21 and 22, and between nucleotide positions 22 and 23 (counting from the 5′ end);
[0374] wherein the dsRNA agents have a two nucleotide overhang at the 3′-end of the antisense strand, and a blunt end at the 5′-end of the antisense strand.

[0375] In another particular embodiment, an RNAi agent of the present invention comprises:
[0376] (a) a sense strand having:
[0377] (i) a length of 21 nucleotides;
[0378] (ii) an ASGPR ligand attached to the 3′-end, wherein said ASGPR ligand comprises three GalNAc derivatives attached through a trivalent branched linker;
[0379] (iii) 2′-F modifications at positions 1, 3, 5, 7, 9 to 11, 13, 15, 17, 19, and 21, and 2′-OMe modifications at positions 2, 4, 6, 8, 12, 14, 16, 18, and 20 (counting from the 5′ end); and
[0380] (iv) phosphorothioate internucleotide linkages between nucleotide positions 1 and 2, and between nucleotide positions 2 and 3 (counting from the 5′ end);
[0381] and
[0382] (b) an antisense strand having:
[0383] (i) a length of 23 nucleotides;
[0384] (ii) 2′-OMe modifications at positions 1, 3, 5, 7, 9, 11 to 13, 15, 17, 19, and 21 to 23, and 2′F modifications at positions 2, 4, 6, 8, 10, 14, 16, 18, and 20 (counting from the 5′ end); and
[0385] (iii) phosphorothioate internucleotide linkages between nucleotide positions 1 and 2, between nucleotide positions 2 and 3, between nucleotide positions 21 and 22, and between nucleotide positions 22 and 23 (counting from the 5′ end);
   wherein the RNAi agents have a two nucleotide overhang at the 3′-end of the antisense strand, and a blunt end at the 5′-end of the antisense strand.

[0386] In another particular embodiment, a RNAi agent of the present invention comprises:
[0387] (a) a sense strand having:
   [0388] (i) a length of 21 nucleotides;
   [0389] (ii) an ASGPR ligand attached to the 3′-end, wherein said ASGPR ligand comprises three GalNAc derivatives attached through a trivalent branched linker;
   [0390] (iii) 2′-OMe modifications at positions 1 to 6, 8, 10, and 12 to 21, 2′-F modifications at positions 7, and 9, and a deoxy-nucleotide (e.g. dT) at position 11 (counting from the 5′ end); and
   [0391] (iv) phosphorothioate internucleotide linkages between nucleotide positions 1 and 2, and between nucleotide positions 2 and 3 (counting from the 5′ end);
[0392] and
[0393] (b) an antisense strand having:
   [0394] (i) a length of 23 nucleotides;
   [0395] (ii) 2′-OMe modifications at positions 1, 3, 7, 9, 11, 13, 15, 17, and 19 to 23, and 2′-F modifications at positions 2, 4 to 6, 8, 10, 12, 14, 16, and 18 (counting from the 5′ end); and
   [0396] (iii) phosphorothioate internucleotide linkages between nucleotide positions 1 and 2, between nucleotide positions 2 and 3, between nucleotide positions 21 and 22, and between nucleotide positions 22 and 23 (counting from the 5′ end);
[0397] wherein the RNAi agents have a two nucleotide overhang at the 3′-end of the antisense strand, and a blunt end at the 5′-end of the antisense strand.

[0398] In another particular embodiment, a RNAi agent of the present invention comprises:
[0399] (a) a sense strand having:
   [0400] (i) a length of 21 nucleotides;
   [0401] (ii) an ASGPR ligand attached to the 3′-end, wherein said ASGPR ligand comprises three GalNAc derivatives attached through a trivalent branched linker;
   [0402] (iii) 2′-OMe modifications at positions 1 to 6, 8, 10, 12, 14, and 16 to 21, and 2′-F modifications at positions 7, 9, 11, 13, and 15; and
   [0403] (iv) phosphorothioate internucleotide linkages between nucleotide positions 1 and 2, and between nucleotide positions 2 and 3 (counting from the 5′ end);
[0404] and
[0405] (b) an antisense strand having:
   [0406] (i) a length of 23 nucleotides;
   [0407] (ii) 2′-OMe modifications at positions 1, 5, 7, 9, 11, 13, 15, 17, 19, and 21 to 23, and 2′-F modifications at positions 2 to 4, 6, 8, 10, 12, 14, 16, 18, and 20 (counting from the 5′ end); and
   [0408] (iii) phosphorothioate internucleotide linkages between nucleotide positions 1 and 2, between nucleotide positions 2 and 3, between nucleotide positions 21 and 22, and between nucleotide positions 22 and 23 (counting from the 5′ end);
      wherein the RNAi agents have a two nucleotide overhang at the 3′-end of the antisense strand, and a blunt end at the 5′-end of the antisense strand.

[0409] In another particular embodiment, a RNAi agent of the present invention comprises:
[0410] (a) a sense strand having:
   [0411] (i) a length of 21 nucleotides;
   [0412] (ii) an ASGPR ligand attached to the 3′-end, wherein said ASGPR ligand comprises three GalNAc derivatives attached through a trivalent branched linker;
   [0413] (iii) 2′-OMe modifications at positions 1 to 9, and 12 to 21, and 2′-F modifications at positions 10, and 11; and
   [0414] (iv) phosphorothioate internucleotide linkages between nucleotide positions 1 and 2, and between nucleotide positions 2 and 3 (counting from the 5′ end);
      and
[0415] (b) an antisense strand having:
   [0416] (i) a length of 23 nucleotides;
   [0417] (ii) 2′-OMe modifications at positions 1, 3, 5, 7, 9, 11 to 13, 15, 17, 19, and 21 to 23, and 2′-F modifications at positions 2, 4, 6, 8, 10, 14, 16, 18, and 20 (counting from the 5′ end); and
   [0418] (iii) phosphorothioate internucleotide linkages between nucleotide positions 1 and 2, between nucleotide positions 2 and 3, between nucleotide positions 21 and 22, and between nucleotide positions 22 and 23 (counting from the 5′ end);
[0419] wherein the RNAi agents have a two nucleotide overhang at the 3′-end of the antisense strand, and a blunt end at the 5′-end of the antisense strand.

[0420] In another particular embodiment, a RNAi agent of the present invention comprises:
[0421] (a) a sense strand having:
   [0422] (i) a length of 21 nucleotides;
   [0423] (ii) an ASGPR ligand attached to the 3′-end, wherein said ASGPR ligand comprises three GalNAc derivatives attached through a trivalent branched linker;
   [0424] (iii) 2′-F modifications at positions 1, 3, 5, 7, 9 to 11, and 13, and 2′-OMe modifications at positions 2, 4, 6, 8, 12, and 14 to 21; and
   [0425] (iv) phosphorothioate internucleotide linkages between nucleotide positions 1 and 2, and between nucleotide positions 2 and 3 (counting from the 5′ end);
[0426] and
[0427] (b) an antisense strand having:
   [0428] (i) a length of 23 nucleotides;
   [0429] (ii) 2′-OMe modifications at positions 1, 3, 5 to 7, 9, 11 to 13, 15, 17 to 19, and 21 to 23, and 2′-F modifications at positions 2, 4, 8, 10, 14, 16, and 20 (counting from the 5′ end); and
   [0430] (iii) phosphorothioate internucleotide linkages between nucleotide positions 1 and 2, between nucleotide positions 2 and 3, between nucleotide positions 21 and 22, and between nucleotide positions 22 and 23 (counting from the 5′ end);
      wherein the RNAi agents have a two nucleotide overhang at the 3′-end of the antisense strand, and a blunt end at the 5′-end of the antisense strand.

[0431] In another particular embodiment, a RNAi agent of the present invention comprises:
[0432] (a) a sense strand having:
   [0433] (i) a length of 21 nucleotides;
   [0434] (ii) an ASGPR ligand attached to the 3′-end, wherein said ASGPR ligand comprises three GalNAc derivatives attached through a trivalent branched linker;
   [0435] (iii) 2′-OMe modifications at positions 1, 2, 4, 6, 8, 12, 14, 15, 17, and 19 to 21, and 2′-F modifications at positions 3, 5, 7, 9 to 11, 13, 16, and 18; and
   [0436] (iv) phosphorothioate internucleotide linkages between nucleotide positions 1 and 2, and between nucleotide positions 2 and 3 (counting from the 5′ end);
[0437] and
[0438] (b) an antisense strand having:
   [0439] (i) a length of 25 nucleotides;
   [0440] (ii) 2′-OMe modifications at positions 1, 4, 6, 7, 9, 11 to 13, 15, 17, and 19 to 23, 2′-F modifications at positions 2, 3, 5, 8, 10, 14, 16, and 18, and desoxy-nucleotides (e.g. dT) at positions 24 and 25 (counting from the 5′ end); and
   [0441] (iii) phosphorothioate internucleotide linkages between nucleotide positions 1 and 2, between nucleotide positions 2 and 3, between nucleotide positions 21 and 22, and between nucleotide positions 22 and 23 (counting from the 5′ end);
      wherein the RNAi agents have a four nucleotide overhang at the 3′-end of the antisense strand, and a blunt end at the 5′-end of the antisense strand.

[0442] In another particular embodiment, a RNAi agent of the present invention comprises:
[0443] (a) a sense strand having:
   [0444] (i) a length of 21 nucleotides;
   [0445] (ii) an ASGPR ligand attached to the 3′-end, wherein said ASGPR ligand comprises three GalNAc derivatives attached through a trivalent branched linker;
   [0446] (iii) 2′-OMe modifications at positions 1 to 6, 8, and 12 to 21, and 2′-F modifications at positions 7, and 9 to 11; and
   [0447] (iv) phosphorothioate internucleotide linkages between nucleotide positions 1 and 2, and between nucleotide positions 2 and 3 (counting from the 5′ end); and
[0448] (b) an antisense strand having:
   [0449] (i) a length of 23 nucleotides;
   [0450] (ii) 2′-OMe modifications at positions 1, 3 to 5, 7, 8, 10 to 13, 15, and 17 to 23, and 2′-F modifications at positions 2, 6, 9, 14, and 16 (counting from the 5′ end); and
   [0451] (iii) phosphorothioate internucleotide linkages between nucleotide positions 1 and 2, between nucleotide positions 2 and 3, between nucleotide positions 21 and 22, and between nucleotide positions 22 and 23 (counting from the 5′ end);
      wherein the RNAi agents have a two nucleotide overhang at the 3′-end of the antisense strand, and a blunt end at the 5′-end of the antisense strand.

[0452] In another particular embodiment, a RNAi agent of the present invention comprises:
[0453] (a) a sense strand having:
   [0454] (i) a length of 21 nucleotides;
   [0455] (ii) an ASGPR ligand attached to the 3′-end, wherein said ASGPR ligand comprises three GalNAc derivatives attached through a trivalent branched linker;
   [0456] (iii) 2′-OMe modifications at positions 1 to 6, 8, and 12 to 21, and 2′-F modifications at positions 7, and 9 to 11; and
   [0457] (iv) phosphorothioate internucleotide linkages between nucleotide positions 1 and 2, and between nucleotide positions 2 and 3 (counting from the 5′ end);
[0458] and
[0459] (b) an antisense strand having:
   [0460] (i) a length of 23 nucleotides;
   [0461] (ii) 2′-OMe modifications at positions 1, 3 to 5, 7, 10 to 13, 15, and 17 to 23, and 2′-F modifications at positions 2, 6, 8, 9, 14, and 16 (counting from the 5′ end); and
   [0462] (iii) phosphorothioate internucleotide linkages between nucleotide positions 1 and 2, between nucleotide positions 2 and 3, between nucleotide positions 21 and 22, and between nucleotide positions 22 and 23 (counting from the 5′ end);
      wherein the RNAi agents have a two nucleotide overhang at the 3′-end of the antisense strand, and a blunt end at the 5′-end of the antisense strand.

[0463] In another particular embodiment, a RNAi agent of the present invention comprises:
[0464] (a) a sense strand having:
   [0465] (i) a length of 19 nucleotides;
   [0466] (ii) an ASGPR ligand attached to the 3′-end, wherein said ASGPR ligand comprises three GalNAc derivatives attached through a trivalent branched linker;
   [0467] (iii) 2′-OMe modifications at positions 1 to 4, 6, and 10 to 19, and 2′-F modifications at positions 5, and 7 to 9; and
   [0468] (iv) phosphorothioate internucleotide linkages between nucleotide positions 1 and 2, and between nucleotide positions 2 and 3 (counting from the 5′ end);
[0469] and
[0470] (b) an antisense strand having:
   [0471] (i) a length of 21 nucleotides;
   [0472] (ii) 2′-OMe modifications at positions 1, 3 to 5, 7, 10 to 13, 15, and 17 to 21, and 2′-F modifications at positions 2, 6, 8, 9, 14, and 16 (counting from the 5′ end); and
   [0473] (iii) phosphorothioate internucleotide linkages between nucleotide positions 1 and 2, between nucleotide positions 2 and 3, between nucleotide positions 19 and 20, and between nucleotide positions 20 and 21 (counting from the 5′ end);
[0474] wherein the RNAi agents have a two nucleotide overhang at the 3′-end of the antisense strand, and a blunt end at the 5′-end of the antisense strand.

[0475] In certain embodiments, the iRNA for use in the methods of the invention is an agent selected from agents listed in any one of Tables 3, 5, 6, or 7. These agents may further comprise a ligand.

III. iRNAs Conjugated to Ligands

[0476] Another modification of the RNA of an iRNA of the invention involves chemically linking to the iRNA one or more ligands, moieties or conjugates that enhance the activity, cellular distribution, or cellular uptake of the iRNA e.g., into a cell. Such moieties include but are not limited to lipid moieties such as a cholesterol moiety (Letsinger et al., Proc. Natl. Acid. Sci. USA, 1989, 86:6553-6556). In other embodiments, the ligand is cholic acid (Manoharan et al., Biorg. Med. Chem. Let., 1994, 4:1053-1060), a thioether, e.g., beryl-S-tritylthiol (Manoharan et al., Ann. N.Y. Acad. Sci., 1992, 660:306-309; Manoharan et al., Biorg. Med. Chem. Let., 1993, 3:2765-2770), a thiocholesterol (Oberhauser et al., Nucl. Acids Res., 1992, 20:533-538), an aliphatic chain, e.g., dodecandiol or undecyl residues (Saison-Behmoaras et al., EMBO J, 1991, 10:1111-1118; Kabanov et al., FEBS Lett., 1990, 259:327-330; Svinarchuk et al., Biochimie, 1993, 75:49-54), a phospholipid, e.g., di-hexadecyl-rac-glycerol or triethyl-ammonium 1,2-di-O-hexadecyl-rac-glycero-3-phosphonate (Manoharan et al., Tetrahedron Lett., 1995, 36:3651-3654; Shea et al., Nucl. Acids Res., 1990, 18:3777-3783), a polyamine or a polyethylene glycol chain (Manoharan et al., Nucleosides & Nucleotides, 1995, 14:969-973), or adamantane acetic acid (Manoharan et al., Tetrahedron Lett., 1995, 36:3651-3654), a palmityl moiety (Mishra et al., Biochim. Biophys. Acta, 1995, 1264:229-237), or an octadecylamine or hexylamino-carbonyloxycholesterol moiety (Crooke et al., J. Pharmacol. Exp. Ther., 1996, 277:923-937).

[0477] In certain embodiments, a ligand alters the distribution, targeting, or lifetime of an iRNA agent into which it is incorporated. In preferred embodiments a ligand provides an enhanced affinity for a selected target, e.g., molecule, cell or cell type, compartment, e.g., a cellular or organ compartment, tissue, organ or region of the body, as, e.g., compared to a species absent such a ligand. Preferred ligands do not take part in duplex pairing in a duplexed nucleic acid.

[0478] Ligands can include a naturally occurring substance, such as a protein (e.g., human serum albumin (HSA), low-density lipoprotein (LDL), or globulin); carbohydrate (e.g., a dextran, pullulan, chitin, chitosan, inulin, cyclodextrin, N-acetylglucosamine, N-acetylgalactosamine, or hyaluronic acid); or a lipid. The ligand can also be a recombinant or synthetic molecule, such as a synthetic polymer, e.g., a synthetic polyamino acid. Examples of polyamino acids include polyamino acid is a polylysine (PLL), poly L-aspartic acid, poly L-glutamic acid, styrene-maleic acid anhydride copolymer, poly(L-lactide-co-glycolied) copolymer, divinyl ether-maleic anhydride copolymer, N-(2-hydroxypropyl) methacrylamide copolymer (HMPA), polyethylene glycol (PEG), polyvinyl alcohol (PVA), polyurethane, poly(2-ethylacryllic acid), N-isopropylacrylamide polymers, or polyphosphazine. Example of polyamines include: polyethylenimine, polylysine (PLL), spermine, spermidine, polyamine, pseudopeptide-polyamine, peptidomimetic polyamine, dendrimer polyamine, arginine, amidine, protamine, cationic lipid, cationic porphyrin, quaternary salt of a polyamine, or an alpha helical peptide.

[0479] Ligands can also include targeting groups, e.g., a cell or tissue targeting agent, e.g., a lectin, glycoprotein, lipid or protein, e.g., an antibody, that binds to a specified cell type such as a kidney cell. A targeting group can be a thyrotropin, melanotropin, lectin, glycoprotein, surfactant protein A, Mucin carbohydrate, multivalent lactose, multivalent galactose, N-acetyl-galactosamine, N-acetyl-glucosamine multivalent mannose, multivalent fucose, glycosylated polyaminoacids, multivalent galactose, transferrin, bisphosphonate, polyglutamate, polyaspartate, a lipid, cholesterol, a steroid, bile acid, folate, vitamin B12, vitamin A, biotin, or an RGD peptide or RGD peptide mimetic. In certain embodiments, the ligand is a multivalent galactose, e.g., an N-acetyl-galactosamine.

[0480] Other examples of ligands include dyes, intercalating agents (e.g. acridines), cross-linkers (e.g. psoralene, mitomycin C), porphyrins (TPPC4, texaphyrin, Sapphyrin), polycyclic aromatic hydrocarbons (e.g., phenazine, dihydrophenazine), artificial endonucleases (e.g. EDTA), lipophilic molecules, e.g., cholesterol, cholic acid, adamantane acetic acid, 1-pyrene butyric acid, dihydrotestosterone, 1,3-Bis-O(hexadecyl)glycerol, geranyloxyhexyl group, hexadecylglycerol, borneol, menthol, 1,3-propanediol, heptadecyl group, palmitic acid, myristic acid, O3-(oleoyl) lithocholic acid, 03-(oleoyl) cholenic acid, dimethoxytrityl, or phenoxazine) and peptide conjugates (e.g., antennapedia peptide, Tat peptide), alkylating agents, phosphate, amino, mercapto, PEG (e.g., PEG-40K), MPEG, [MPEG] 2, polyamino, alkyl, substituted alkyl, radiolabeled markers, enzymes, haptens (e.g. biotin), transport/absorption facilitators (e.g., aspirin, vitamin E, folic acid), synthetic ribonucleases (e.g., imidazole, bisimidazole, histamine, imidazole clusters, acridine-imidazole conjugates, Eu3+ complexes of tetraazamacrocycles), dinitrophenyl, HRP, or AP.

[0481] Ligands can be proteins, e.g., glycoproteins, or peptides, e.g., molecules having a specific affinity for a co-ligand, or antibodies e.g., an antibody, that binds to a specified cell type such as a hepatic cell. Ligands can also include hormones and hormone receptors. They can also include non-peptidic species, such as lipids, lectins, carbohydrates, vitamins, cofactors, multivalent lactose, multivalent galactose, N-acetyl-galactosamine, N-acetyl-glucosamine multivalent mannose, or multivalent fucose. The ligand can be, for example, a lipopolysaccharide, an activator of p38 MAP kinase, or an activator of NF-κB.

[0482] The ligand can be a substance, e.g., a drug, which can increase the uptake of the iRNA agent into the cell, for example, by disrupting the cell's cytoskeleton, e.g., by disrupting the cell's microtubules, microfilaments, or intermediate filaments. The drug can be, for example, taxol, vincristine, vinblastine, cytochalasin, nocodazole, japlakinolide, latrunculin A, phalloidin, swinholide A, indanocine, or myoservin.

[0483] In some embodiments, a ligand attached to an iRNA as described herein acts as a pharmacokinetic modulator (PK modulator). PK modulators include lipophiles, bile acids, steroids, phospholipid analogues, peptides, protein binding agents, PEG, vitamins, etc. Exemplary PK modulators include, but are not limited to, cholesterol, fatty acids, cholic acid, lithocholic acid, dialkylglycerides, diacylglyceride, phospholipids, sphingolipids, naproxen, ibuprofen, vitamin E, biotin. Oligonucleotides that comprise a number of phosphorothioate linkages are also known to bind to serum protein, thus short oligonucleotides, e.g., oligonucleotides of about 5 bases, 10 bases, 15 bases, or 20 bases, comprising multiple of phosphorothioate linkages in the backbone are also amenable to the present invention as ligands (e.g. as PK modulating ligands). In addition, aptamers that bind serum components (e.g. serum proteins) are also suitable for use as PK modulating ligands in the embodiments described herein.

[0484] Ligand-conjugated iRNAs of the invention may be synthesized by the use of an oligonucleotide that bears a pendant reactive functionality, such as that derived from the attachment of a linking molecule onto the oligonucleotide (described below). This reactive oligonucleotide may be reacted directly with commercially-available ligands, ligands that are synthesized bearing any of a variety of protecting groups, or ligands that have a linking moiety attached thereto.

[0485] The oligonucleotides used in the conjugates of the present invention may be conveniently and routinely made through the well-known technique of solid-phase synthesis. Equipment for such synthesis is sold by several vendors including, for example, Applied Biosystems® (Foster City, Calif.). Any other methods for such synthesis known in the art may additionally or alternatively be employed. It is also known to use similar techniques to prepare other oligonucleotides, such as the phosphorothioates and alkylated derivatives.

[0486] In the ligand-conjugated iRNAs and ligand-molecule bearing sequence-specific linked nucleosides of the present invention, the oligonucleotides and oligonucleosides may be assembled on a suitable DNA synthesizer utilizing standard nucleotide or nucleoside precursors, or nucleotide or nucleoside conjugate precursors that already bear the linking moiety, ligand-nucleotide or nucleoside-conjugate precursors that already bear the ligand molecule, or non-nucleoside ligand-bearing building blocks.

[0487] When using nucleotide-conjugate precursors that already bear a linking moiety, the synthesis of the sequence-specific linked nucleosides is typically completed, and the ligand molecule is then reacted with the linking moiety to form the ligand-conjugated oligonucleotide. In some embodiments, the oligonucleotides or linked nucleosides of the present invention are synthesized by an automated synthesizer using phosphoramidites derived from ligand-nucleoside conjugates in addition to the standard phosphoramidites and non-standard phosphoramidites that are commercially available and routinely used in oligonucleotide synthesis.

### A. Lipid Conjugates

[0488] In certain embodiments, the ligand or conjugate is a lipid or lipid-based molecule. Such a lipid or lipid-based molecule preferably binds a serum protein, e.g., human serum albumin (HSA). An HSA binding ligand allows for distribution of the conjugate to a target tissue, e.g., a non-kidney target tissue of the body. For example, the target tissue can be the liver, including parenchymal cells of the liver. Other molecules that can bind HSA can also be used as ligands. For example, naproxen or aspirin can be used. A lipid or lipid-based ligand can (a) increase resistance to degradation of the conjugate, (b) increase targeting or transport into a target cell or cell membrane, or (c) can be used to adjust binding to a serum protein, e.g., HSA.

[0489] A lipid based ligand can be used to inhibit, e.g., control the binding of the conjugate to a target tissue. For example, a lipid or lipid-based ligand that binds to HSA more strongly will be less likely to be targeted to the kidney and therefore less likely to be cleared from the body. A lipid or lipid-based ligand that binds to HSA less strongly can be used to target the conjugate to the kidney.

[0490] In certain embodiments, the lipid based ligand binds HSA. Preferably, it binds HSA with a sufficient affinity such that the conjugate will be preferably distributed to a non-kidney tissue. However, it is preferred that the affinity not be so strong that the HSA-ligand binding cannot be reversed.

[0491] In other embodiments, the lipid based ligand binds HSA weakly or not at all, such that the conjugate will be preferably distributed to the kidney. Other moieties that target to kidney cells can also be used in place of, or in addition to, the lipid based ligand.

[0492] In another aspect, the ligand is a moiety, e.g., a vitamin, which is taken up by a target cell, e.g., a proliferating cell. These are particularly useful for treating disorders characterized by unwanted cell proliferation, e.g., of the malignant or non-malignant type, e.g., cancer cells. Exemplary vitamins include vitamin A, E, and K. Other exemplary vitamins include are B vitamin, e.g., folic acid, B12, riboflavin, biotin, pyridoxal or other vitamins or nutrients taken up by target cells such as liver cells. Also included are HSA and low density lipoprotein (LDL).

### B. Cell Permeation Agents

[0493] In another aspect, the ligand is a cell-permeation agent, preferably a helical cell-permeation agent. Preferably, the agent is amphipathic. An exemplary agent is a peptide such as tat or antennopedia. If the agent is a peptide, it can be modified, including a peptidylmimetic, invertomers, non-peptide or pseudo-peptide linkages, and use of D-amino acids. The helical agent is preferably an alpha-helical agent, which preferably has a lipophilic and a lipophobic phase.

[0494] The ligand can be a peptide or peptidomimetic. A peptidomimetic (also referred to herein as an oligopeptidomimetic) is a molecule capable of folding into a defined three-dimensional structure similar to a natural peptide. The attachment of peptide and peptidomimetics to iRNA agents can affect pharmacokinetic distribution of the iRNA, such as by enhancing cellular recognition and absorption. The peptide or peptidomimetic moiety can be about 5-50 amino acids long, e.g., about 5, 10, 15, 20, 25, 30, 35, 40, 45, or 50 amino acids long.

[0495] A peptide or peptidomimetic can be, for example, a cell permeation peptide, cationic peptide, amphipathic peptide, or hydrophobic peptide (e.g., consisting primarily of Tyr, Trp, or Phe). The peptide moiety can be a dendrimer peptide, constrained peptide or crosslinked peptide. In another alternative, the peptide moiety can include a hydrophobic membrane translocation sequence (MTS). An exemplary hydrophobic MTS-containing peptide is RFGF having the amino acid sequence AAVALLPAVLLALLAP (SEQ ID NO: 13). An RFGF analogue (e.g., amino acid sequence AALLPVLLAAP (SEQ ID NO:14) containing a hydrophobic MTS can also be a targeting moiety. The peptide moiety can be a “delivery” peptide, which can carry large polar molecules including peptides, oligonucleotides, and protein across cell membranes. For example, sequences from the HIV Tat protein (GRKKRRQRRRPPQ (SEQ ID NO:15) and the Drosophila Antennapedia protein (RQIKIWFQNRRMKWKK (SEQ ID NO:16) have been found to be capable of functioning as delivery peptides. A peptide or peptidomimetic can be encoded by a random sequence of DNA, such as a peptide identified from a phage-display library, or one-bead-one-compound (OBOC) combinatorial library (Lam et al., Nature, 354:82-84, 1991). Examples of a peptide or peptidomimetic tethered to a dsRNA agent via an incorporated monomer unit for cell targeting purposes is an arginine-glycine-aspartic acid (RGD)-peptide, or RGD mimic. A peptide moiety can range in length from about 5 amino acids to about 40 amino acids. The peptide moieties can have a structural modification, such as to increase stability or direct conformational properties. Any of the structural modifications described below can be utilized.

[0496] An RGD peptide for use in the compositions and methods of the invention may be linear or cyclic, and may be modified, e.g., glycosylated or methylated, to facilitate targeting to a specific tissue(s). RGD-containing peptides and peptidiomimemtics may include D-amino acids, as well as synthetic RGD mimics. In addition to RGD, one can use other moieties that target the integrin ligand. Preferred conjugates of this ligand target PECAM-1 or VEGF.

[0497] A “cell permeation peptide” is capable of permeating a cell, e.g., a microbial cell, such as a bacterial or fungal cell, or a mammalian cell, such as a human cell. A microbial cell-permeating peptide can be, for example, an α-helical linear peptide (e.g., LL-37 or Ceropin P1), a disulfide bond-containing peptide (e.g., α-defensin, β-defensin or bactenecin), or a peptide containing only one or two dominating amino acids (e.g., PR-39 or indolicidin). A cell permeation peptide can also include a nuclear localization signal (NLS). For example, a cell permeation peptide can be a bipartite amphipathic peptide, such as MPG, which is derived from the fusion peptide domain of HIV-1 gp41 and the NLS of SV40 large T antigen (Simeoni et al., Nucl. Acids Res. 31:2717-2724, 2003).

### C. Carbohydrate Conjugates

[0498] In some embodiments of the compositions and methods of the invention, an iRNA further comprises a carbohydrate. The carbohydrate conjugated iRNA is advantageous for the in vivo delivery of nucleic acids, as well as compositions suitable for in vivo therapeutic use, as described herein. As used herein, “carbohydrate” refers to a compound which is either a carbohydrate per se made up of one or more monosaccharide units having at least 6 carbon atoms (which can be linear, branched or cyclic) with an oxygen, nitrogen or sulfur atom bonded to each carbon atom; or a compound having as a part thereof a carbohydrate moiety made up of one or more monosaccharide units each having at least six carbon atoms (which can be linear, branched or cyclic), with an oxygen, nitrogen or sulfur atom bonded to each carbon atom. Representative carbohydrates include the sugars (mono-, di-, tri-, and oligosaccharides containing from about 4, 5, 6, 7, 8, or 9 monosaccharide units), and polysaccharides such as starches, glycogen, cellulose and polysaccharide gums. Specific monosaccharides include C5 and above (e.g., C5, C6, C7, or C8) sugars; di- and trisaccharides include sugars having two or three monosaccharide units (e.g., C5, C6, C7, or C8).

[0499] In certain embodiments, a carbohydrate conjugate for use in the compositions and methods of the invention is a monosaccharide.

[0500] In one embodiment, a carbohydrate conjugate for use in the compositions and methods of the invention is selected from the group consisting of:

[chemical structure]

[chemical structure]

[chemical structure]

[chemical structure]

[chemical structure]

[chemical structure]

[chemical structure]

[chemical structure]

[0501] In another embodiment, a carbohydrate conjugate for use in the compositions and methods offthe invention is a monosaccharide. In one embodiment, the monosaccharide is an N-acetylgalactosamine, such as

[chemical structure]

[0502] Another representative carbohydrate conjugate for use in the embodiments described herein includes, but is not limited to,

[chemical structure]

when one of X or Y is an oligonucleotide, the other is a hydrogen.

[0503] In certain embodiments of the invention, the GalNAc or GalNAc derivative is attached to an iRNA agent of the invention via a monovalent linker. In some embodiments, the GalNAc or GalNAc derivative is attached to an iRNA agent of the invention via a bivalent linker. In yet other embodiments of the invention, the GalNAc or GalNAc derivative is attached to an iRNA agent of the invention via a trivalent linker.

[0504] In one embodiment, the double stranded RNAi agents of the invention comprise one GalNAc or GalNAc derivative attached to the iRNA agent, e.g., the 5′end of the sense strand of a dsRNA agent, or the 5′ end of one or both sense strands of a dual targeting RNAi agent as described herein. In another embodiment, the double stranded RNAi agents of the invention comprise a plurality (e.g., 2, 3, 4, 5, or 6) GalNAc or GalNAc derivatives, each independently attached to a plurality of nucleotides of the double stranded RNAi agent through a plurality of monovalent linkers.

[0505] In some embodiments, for example, when the two strands of an iRNA agent of the invention are part of one larger molecule connected by an uninterrupted chain of nucleotides between the 3′-end of one strand and the 5′-end of the respective other strand forming a hairpin loop comprising, a plurality of unpaired nucleotides, each unpaired nucleotide within the hairpin loop may independently comprise a GalNAc or GalNAc derivative attached via a monovalent linker.

[0506] In some embodiments, the carbohydrate conjugate further comprises one or more additional ligands as described above, such as, but not limited to, a PK modulator or a cell permeation peptide.

[0507] Additional carbohydrate conjugates and linkers suitable for use in the present invention include those described in PCT Publication Nos. WO 2014/179620 and WO 2014/179627, the entire contents of each of which are incorporated herein by reference.

### D. Linkers

[0508] In some embodiments, the conjugate or ligand described herein can be attached to an iRNA oligonucleotide with various linkers that can be cleavable or non-cleavable.

[0509] The term “linker” or “linking group” means an organic moiety that connects two parts of a compound, e.g., covalently attaches two parts of a compound. Linkers typically comprise a direct bond or an atom such as oxygen or sulfur, a unit such as NR8,C(O),C(O) NH, SO, SO₂, SO₂NH or a chain of atoms, such as, but not limited to, substituted or unsubstituted alkyl, substituted or unsubstituted alkenyl, substituted or unsubstituted alkynyl, arylalkyl, arylalkenyl, arylalkynyl, heteroarylalkyl, heteroarylalkenyl, heteroarylalkynyl, heterocyclylalkyl, heterocyclylalkenyl, heterocyclylalkynyl, aryl, heteroaryl, heterocyclyl, cycloalkyl, cycloalkenyl, alkylarylalkyl, alkylarylalkenyl, alkylarylalkynyl, alkenylarylalkyl, alkenylarylalkenyl, alkenylarylalkynyl, alkynylarylalkyl, alkynylarylalkenyl, alkynylarylalkynyl, alkylheteroarylalkyl, alkylheteroarylalkenyl, alkylheteroarylalkynyl, alkenylheteroarylalkyl, alkenylheteroarylalkenyl, alkenylheteroarylalkynyl, alkynylheteroarylalkyl, alkynylheteroarylalkenyl, alkynylheteroarylalkynyl, alkylheterocyclylalkyl, alkylheterocyclylalkenyl, alkylhererocyclylalkynyl, alkenylheterocyclylalkyl, alkenylheterocyclylalkenyl, alkenylheterocyclylalkynyl, alkynylheterocyclylalkyl, alkynylheterocyclylalkenyl, alkynylheterocyclylalkynyl, alkylaryl, alkenylaryl, alkynylaryl, alkylheteroaryl, alkenylheteroaryl, alkynylhereroaryl, which one or more methylenes can be interrupted or terminated by O, S, S(O), SO₂,N(R⁸),C(O), substituted or unsubstituted aryl, substituted or unsubstituted heteroaryl, or substituted or unsubstituted heterocyclic; where R⁸ is hydrogen, acyl, aliphatic, or substituted aliphatic. In one embodiment, the linker is about 1-24 atoms, 2-24, 3-24, 4-24, 5-24, 6-24, 6-18, 7-18, 8-18, 7-17, 8-17, 6-16, 7-17, or 8-16 atoms.

[0510] A cleavable linking group is one which is sufficiently stable outside the cell, but which upon entry into a target cell is cleaved to release the two parts the linker is holding together. In a preferred embodiment, the cleavable linking group is cleaved at least about 10 times, 20, times, 30 times, 40 times, 50 times, 60 times, 70 times, 80 times, 90 times, or more, or at least 100 times faster in a target cell or under a first reference condition (which can, e.g., be selected to mimic or represent intracellular conditions) than in the blood of a subject, or under a second reference condition (which can, e.g., be selected to mimic or represent conditions found in the blood or serum).

[0511] Cleavable linking groups are susceptible to cleavage agents, e.g., pH, redox potential, or the presence of degradative molecules. Generally, cleavage agents are more prevalent or found at higher levels or activities inside cells than in serum or blood. Examples of such degradative agents include: redox agents which are selected for particular substrates or which have no substrate specificity, including, e.g., oxidative or reductive enzymes or reductive agents such as mercaptans, present in cells, that can degrade a redox cleavable linking group by reduction; esterases; endosomes or agents that can create an acidic environment, e.g., those that result in a pH of five or lower; enzymes that can hydrolyze or degrade an acid cleavable linking group by acting as a general acid, peptidases (which can be substrate specific), and phosphatases.

[0512] A cleavable linkage group, such as a disulfide bond can be susceptible to pH. The pH of human serum is 7.4, while the average intracellular pH is slightly lower, ranging from about 7.1-7.3. Endosomes have a more acidic pH, in the range of 5.5-6.0, and lysosomes have an even more acidic pH at around 5.0. Some linkers will have a cleavable linking group that is cleaved at a preferred pH, thereby releasing a cationic lipid from the ligand inside the cell, or into the desired compartment of the cell.

[0513] A linker can include a cleavable linking group that is cleavable by a particular enzyme. The type of cleavable linking group incorporated into a linker can depend on the cell to be targeted. For example, a liver-targeting ligand can be linked to a cationic lipid through a linker that includes an ester group. Liver cells are rich in esterases, and therefore the linker will be cleaved more efficiently in liver cells than in cell types that are not esterase-rich. Other cell-types rich in esterases include cells of the lung, renal cortex, and testis.

[0514] Linkers that contain peptide bonds can be used when targeting cell types rich in peptidases, such as liver cells and synoviocytes.

[0515] In general, the suitability of a candidate cleavable linking group can be evaluated by testing the ability of a degradative agent (or condition) to cleave the candidate linking group. It will also be desirable to also test the candidate cleavable linking group for the ability to resist cleavage in the blood or when in contact with other non-target tissue. Thus, one can determine the relative susceptibility to cleavage between a first and a second condition, where the first is selected to be indicative of cleavage in a target cell and the second is selected to be indicative of cleavage in other tissues or biological fluids, e.g., blood or serum. The evaluations can be carried out in cell free systems, in cells, in cell culture, in organ or tissue culture, or in whole animals. It can be useful to make initial evaluations in cell-free or culture conditions and to confirm by further evaluations in whole animals. In preferred embodiments, useful candidate compounds are cleaved at least about 2, 4, 10, 20, 30, 40, 50, 60, 70, 80, 90, or 100 times faster in the cell (or under in vitro conditions selected to mimic intracellular conditions) as compared to blood or serum (or under in vitro conditions selected to mimic extracellular conditions).

i. Redox Cleavable Linking Groups

[0516] In certain embodiments, a cleavable linking group is a redox cleavable linking group that is cleaved upon reduction or oxidation. An example of reductively cleavable linking group is a disulphide linking group (—S—S—). To determine if a candidate cleavable linking group is a suitable “reductively cleavable linking group,” or for example is suitable for use with a particular iRNA moiety and particular targeting agent one can look to methods described herein. For example, a candidate can be evaluated by incubation with dithiothreitol (DTT), or other reducing agent using reagents know in the art, which mimic the rate of cleavage which would be observed in a cell, e.g., a target cell. The candidates can also be evaluated under conditions which are selected to mimic blood or serum conditions. In one, candidate compounds are cleaved by at most about 10% in the blood. In other embodiments, useful candidate compounds are degraded at least about 2, 4, 10, 20, 30, 40, 50, 60, 70, 80, 90, or about 100 times faster in the cell (or under in vitro conditions selected to mimic intracellular conditions) as compared to blood (or under in vitro conditions selected to mimic extracellular conditions). The rate of cleavage of candidate compounds can be determined using standard enzyme kinetics assays under conditions chosen to mimic intracellular media and compared to conditions chosen to mimic extracellular media.

ii. Phosphate-Based Cleavable Linking Groups

[0517] In other embodiments, a cleavable linker comprises a phosphate-based cleavable linking group. A phosphate-based cleavable linking group is cleaved by agents that degrade or hydrolyze the phosphate group. An example of an agent that cleaves phosphate groups in cells are enzymes such as phosphatases in cells. Examples of phosphate-based linking groups are—O-P(O) (ORk)—O—, —O—P(S) (ORk)—O—, —O—P(S) (SRk)—O—, —S-P(O) (ORk)—O—, —O-P(O) (ORk)—S—, —S-P(O) (ORk)—S—, —O—P(S) (ORk)—S—, —S—P(S) (ORk)—O—, —O-P(O) (Rk)—O—, —O—P(S) (Rk)—O—, —S-P(O) (Rk)—O—, —S—P(S) (Rk)—O—, —S-P(O) (Rk)—S—, —O—P(S) (Rk)—S—. Preferred embodiments are—O-P(O) (OH)—O—, —O—P(S) (OH)—O—, —O—P(S) (SH)—O—, —S-P(O) (OH)—O—, —O-P(O) (OH)—S—, —S-P(O) (OH)—S—, —O—P(S) (OH)—S—, —S—P(S) (OH)—O—, —O-P(O) (H)—O—, —O—P(S) (H)—O—, —S-P(O) (H)—O, —S—P(S) (H)—O—, —S-P(O) (H)—S—, and—O—P(S) (H)—S—. A preferred embodiment is-O-P(O) (OH)—O—. These candidates can be evaluated using methods analogous to those described above.

iii. Acid Cleavable Linking Groups

[0518] In other embodiments, a cleavable linker comprises an acid cleavable linking group. An acid cleavable linking group is a linking group that is cleaved under acidic conditions. In preferred embodiments acid cleavable linking groups are cleaved in an acidic environment with a pH of about 6.5 or lower (e.g., about 6.0, 5.5, 5.0, or lower), or by agents such as enzymes that can act as a general acid. In a cell, specific low pH organelles, such as endosomes and lysosomes can provide a cleaving environment for acid cleavable linking groups. Examples of acid cleavable linking groups include but are not limited to hydrazones, esters, and esters of amino acids. Acid cleavable groups can have the general formula —C═NN—,C(O) O, or —OC(O). A preferred embodiment is when the carbon attached to the oxygen of the ester (the alkoxy group) is an aryl group, substituted alkyl group, or tertiary alkyl group such as dimethyl pentyl or t-butyl. These candidates can be evaluated using methods analogous to those described above.

iv. Ester-Based Linking Groups

[0519] In other embodiments, a cleavable linker comprises an ester-based cleavable linking group. An ester-based cleavable linking group is cleaved by enzymes such as esterases and amidases in cells. Examples of ester-based cleavable linking groups include, but are not limited to, esters of alkylene, alkenylene and alkynylene groups. Ester cleavable linking groups have the general formula —C(O)O—, or —OC(O)—. These candidates can be evaluated using methods analogous to those described above.

v. Peptide-Based Cleaving Groups

[0520] In yet other embodiments, a cleavable linker comprises a peptide-based cleavable linking group. A peptide-based cleavable linking group is cleaved by enzymes such as peptidases and proteases in cells. Peptide-based cleavable linking groups are peptide bonds formed between amino acids to yield oligopeptides (e.g., dipeptides, tripeptides etc.) and polypeptides. Peptide-based cleavable groups do not include the amide group (—C(O) NH—). The amide group can be formed between any alkylene, alkenylene or alkynelene. A peptide bond is a special type of amide bond formed between amino acids to yield peptides and proteins. The peptide based cleavage group is generally limited to the peptide bond (i.e., the amide bond) formed between amino acids yielding peptides and proteins and does not include the entire amide functional group. Peptide-based cleavable linking groups have the general formula-NHCHRAC (O) NHCHRBC(O)—, where RA and RB are the R groups of the two adjacent amino acids. These candidates can be evaluated using methods analogous to those described above.

[0521] In some embodiments, an iRNA of the invention is conjugated to a carbohydrate through a linker. Non-limiting examples of iRNA carbohydrate conjugates with linkers of the compositions and methods of the invention include, but are not limited to,

[chemical structure]

[chemical structure]

when one of X or Y is an oligonucleotide, the other is a hydrogen.

[0522] In certain embodiments of the compositions and methods of the invention, a ligand is one or more “GalNAc” (N-acetylgalactosamine) derivatives attached through a bivalent or trivalent branched linker.

[0523] In one embodiment, a dsRNA of the invention is conjugated to a bivalent or trivalent branched linker selected from the group of structures shown in any of formula (XLV)-(XLVI):

[chemical structure]

[0524] wherein:
[0525] q2A, q2B, q3A, q3B, q4A, q4B, q5A, q5B and q5C represent independently for each occurrence 0-20 and wherein the repeating unit can be the same or different; P^{2A}, P^{2B}, P^{3A}, P^{3B}, P^{4A}, P^{4B}, P^{5A}, P^{5B}, P^{5C}, T^{2A}, T^{2B}, T^{3A}, T^{3B}, T^{4A}, T^{4B}, T^{4A}, T^{5B}, T^{5C} are each independently for each occurrence absent, CO, NH, O, S, OC(O), NHC(O), CH₂, CH₂NH or CH₂O;
[0526] Q^{2A}, Q^{2B}, Q^{3A}, Q^{3B}, Q^{4A}, Q^{4B}, Q^{5A}, Q^{5B}, Q5° C. are independently for each occurrence absent, alkylene, substituted alkylene wherein one or more methylenes can be interrupted or terminated by one or more of O, S, S(O), SO₂,N(RN), C(R′)═C(R″), C═C or C(O); R^{2A}, R^{2B}, R^{3A}, R^{3B}, R^{4A}, R^{4B}, R^{5A}, R^{5B}, R^{5C} are each independently for each occurrence absent, NH, O, S, CH₂,C(O) O, C(O) NH, NHCH(R^{a})C(O), —C(O)—CH(R^{a})—NH—, CO, CH═N—O,

[chemical structure]

or heterocyclyl;
[0527] L^{2A}, L^{2B}. L^{3A}, L^{3B}, L^{4A}, L^{4B}, L^{5A}, L^{5B} and L^{5C}, represent the ligand; i.e. each independently for each occurrence a monosaccharide (such as GalNAc), disaccharide, trisaccharide, tetrasaccharide, oligosaccharide, or polysaccharide; and R^{a} is H or amino acid side chain. Trivalent conjugating GalNAc derivatives are particularly useful for use with RNAi agents for inhibiting the expression of a target gene, such as those of formula (XLIX):

[chemical structure]

[0528] wherein L5A, L5B and L5° C. represent a monosaccharide, such as GalNAc derivative.

[0529] Examples of suitable bivalent and trivalent branched linker groups conjugating GalNAc derivatives include, but are not limited to, the structures recited above as formulas II, VII, XI, X, and XIII.

[0530] Representative U.S. Patents that teach the preparation of RNA conjugates include, but are not limited to, U.S. Pat. Nos. 4,828,979; 4,948,882; 5,218,105; 5,525,465; 5,541,313; 5,545,730; 5,552,538; 5,578,717, 5,580,731; 5,591,584; 5,109,124; 5,118,802; 5,138,045; 5,414,077; 5,486,603; 5,512,439; 5,578,718; 5,608,046; 4,587,044; 4,605,735; 4,667,025; 4,762,779; 4,789,737; 4,824,941; 4,835,263; 4,876,335; 4,904,582; 4,958,013; 5,082,830; 5,112,963; 5,214,136; 5,082,830; 5,112,963; 5,214,136; 5,245,022; 5,254,469; 5,258,506; 5,262,536; 5,272,250; 5,292,873; 5,317,098; 5,371,241, 5,391,723; 5,416,203, 5,451,463; 5,510,475; 5,512,667; 5,514,785; 5,565,552; 5,567,810; 5,574,142; 5,585,481; 5,587,371; 5,595,726; 5,597,696; 5,599,923; 5,599,928;5,688,941; 6,294,664; 6,320,017; 6,576,752; 6,783,931; 6,900,297; 7,037,646; and 8,106,022, the entire contents of each of which are hereby incorporated herein by reference.

[0531] It is not necessary for all positions in a given compound to be uniformly modified, and in fact more than one of the aforementioned modifications can be incorporated in a single compound or even at a single nucleoside within an iRNA. The present invention also includes iRNA compounds that are chimeric compounds.

[0532] “Chimeric” iRNA compounds or “chimeras,” in the context of this invention, are iRNA compounds, preferably dsRNAi agents, that contain two or more chemically distinct regions, each made up of at least one monomer unit, i.e., a nucleotide in the case of a dsRNA compound. These iRNAs typically contain at least one region wherein the RNA is modified so as to confer upon the iRNA increased resistance to nuclease degradation, increased cellular uptake, or increased binding affinity for the target nucleic acid. An additional region of the iRNA can serve as a substrate for enzymes capable of cleaving RNA:DNA or RNA:RNA hybrids. By way of example, RNase H is a cellular endonuclease which cleaves the RNA strand of an RNA:DNA duplex. Activation of RNase H, therefore, results in cleavage of the RNA target, thereby greatly enhancing the efficiency of iRNA inhibition of gene expression. Consequently, comparable results can often be obtained with shorter iRNAs when chimeric dsRNAs are used, compared to phosphorothioate deoxy dsRNAs hybridizing to the same target region. Cleavage of the RNA target can be routinely detected by gel electrophoresis and, if necessary, associated nucleic acid hybridization techniques known in the art.

[0533] In certain instances, the RNA of an iRNA can be modified by a non-ligand group. A number of non-ligand molecules have been conjugated to iRNAs in order to enhance the activity, cellular distribution or cellular uptake of the iRNA, and procedures for performing such conjugations are available in the scientific literature. Such non-ligand moieties have included lipid moieties, such as cholesterol (Kubo, T. et al., Biochem. Biophys. Res. Comm., 2007, 365 (1): 54-61; Letsinger et al., Proc. Natl. Acad. Sci. USA, 1989, 86:6553), cholic acid (Manoharan et al., Bioorg. Med. Chem. Lett., 1994, 4:1053), a thioether, e.g., hexyl-S-tritylthiol (Manoharan et al., Ann. N.Y. Acad. Sci., 1992, 660:306; Manoharan et al., Bioorg. Med. Chem. Let., 1993, 3:2765), a thiocholesterol (Oberhauser et al., Nucl. Acids Res., 1992, 20:533), an aliphatic chain, e.g., dodecandiol or undecyl residues (Saison-Behmoaras et al., EMBO J., 1991, 10:111; Kabanov et al., FEBS Lett., 1990, 259:327; Svinarchuk et al., Biochimie, 1993, 75:49), a phospholipid, e.g., di-hexadecyl-rac-glycerol or triethylammonium 1,2-di-O-hexadecyl-rac-glycero-3-H-phosphonate (Manoharan et al., Tetrahedron Lett., 1995, 36:3651; Shea et al., Nucl. Acids Res., 1990, 18:3777), a polyamine or a polyethylene glycol chain (Manoharan et al., Nucleosides & Nucleotides, 1995, 14:969), or adamantane acetic acid (Manoharan et al., Tetrahedron Lett., 1995, 36:3651), a palmityl moiety (Mishra et al., Biochim. Biophys. Acta, 1995, 1264:229), or an octadecylamine or hexylamino-carbonyl-oxycholesterol moiety (Crooke et al., J. Pharmacol. Exp. Ther., 1996, 277:923). Representative United States patents that teach the preparation of such RNA conjugates have been listed above. Typical conjugation protocols involve the synthesis of RNAs bearing an aminolinker at one or more positions of the sequence. The amino group is then reacted with the molecule being conjugated using appropriate coupling or activating reagents. The conjugation reaction can be performed either with the RNA still bound to the solid support or following cleavage of the RNA, in solution phase. Purification of the RNA conjugate by HPLC typically affords the pure conjugate.

IV. Delivery of an iRNA of the Invention

[0534] The delivery of an iRNA of the invention to a cell e.g., a cell within a subject, such as a human subject (e.g., a subject in need thereof, such as a subject at risk of developing or diagnosed with a metabolic disorder, e.g., a deficiency in glycemic control) can be achieved in a number of different ways. For example, delivery may be performed by contacting a cell with an iRNA of the invention either in vitro or in vivo. In vivo delivery may also be performed directly by administering a composition comprising an iRNA, e.g., a dsRNA, to a subject. Alternatively, in vivo delivery may be performed indirectly by administering one or more vectors that encode and direct the expression of the iRNA. These alternatives are discussed further below.

[0535] In general, any method of delivering a nucleic acid molecule (in vitro or in vivo) can be adapted for use with an iRNA of the invention (see e.g., Akhtar S. and Julian R L. (1992) Trends Cell. Biol. 2 (5): 139-144 and WO94/02595, which are incorporated herein by reference in their entireties). For in vivo delivery, factors to consider in order to deliver an iRNA molecule include, for example, biological stability of the delivered molecule, prevention of non-specific effects, and accumulation of the delivered molecule in the target tissue. The non-specific effects of an iRNA can be minimized by local administration, for example, by direct injection or implantation into a tissue or topically administering the preparation. Local administration to a treatment site maximizes local concentration of the agent, limits the exposure of the agent to systemic tissues that can otherwise be harmed by the agent or that can degrade the agent, and permits a lower total dose of the iRNA molecule to be administered. Several studies have shown successful knockdown of gene products when a dsRNAi agent is administered locally. For example, intraocular delivery of a VEGF dsRNA by intravitreal injection in cynomolgus monkeys (Tolentino, M J, et al (2004) Retina 24:132-138) and subretinal injections in mice (Reich, S J., et al (2003) Mol. Vis. 9:210-216) were both shown to prevent neovascularization in an experimental model of age-related macular degeneration. In addition, direct intratumoral injection of a dsRNA in mice reduces tumor volume (Pille, J., et al (2005) Mol. Ther.11:267-274) and can prolong survival of tumor-bearing mice (Kim, W J., et al (2006) Mol. Ther. 14:343-350; Li, S., et al (2007) Mol. Ther. 15:515-523). RNA interference has also shown success with local delivery to the CNS by direct injection (Dorn, G., et al. (2004) Nucleic Acids 32: e49; Tan, P H., et al (2005) Gene Ther. 12:59-66; Makimura, H., et al (2002) BMC Neurosci. 3:18; Shishkina, G T., et al (2004) Neuroscience 129:521-528; Thakker, E R., et al (2004) Proc. Natl. Acad. Sci. U.S.A. 101:17270-17275; Akaneya, Y., et al (2005) J. Neurophysiol. 93:594-602) and to the lungs by intranasal administration (Howard, K A., et al (2006) Mol. Ther. 14:476-484; Zhang, X., et al (2004) J. Biol. Chem. 279:10677-10684; Bitko, V., et al (2005) Nat. Med. 11:50-55). For administering an iRNA systemically for the prevention of an infection, the RNA can be modified or alternatively delivered using a drug delivery system; both methods act to prevent the rapid degradation of the dsRNA by endo- and exo-nucleases in vivo. Modification of the RNA or the pharmaceutical carrier can also permit targeting of the iRNA to the target tissue and avoid undesirable off-target effects. iRNA molecules can be modified by chemical conjugation to lipophilic groups such as cholesterol to enhance cellular uptake and prevent degradation. For example, an iRNA directed against ApoB conjugated to a lipophilic cholesterol moiety was injected systemically into mice and resulted in knockdown of apoB mRNA in both the liver and jejunum (Soutschek, J., et al (2004) Nature 432:173-178). Conjugation of an iRNA to an aptamer has been shown to inhibit tumor growth and mediate tumor regression in a mouse model of prostate cancer (McNamara, J O, et al (2006) Nat. Biotechnol. 24:1005-1015). In an alternative embodiment, the iRNA can be delivered using drug delivery systems such as a nanoparticle, a dendrimer, a polymer, liposomes, or a cationic delivery system. Positively charged cationic delivery systems facilitate binding of an iRNA molecule (negatively charged) and also enhance interactions at the negatively charged cell membrane to permit efficient uptake of an iRNA by the cell. Cationic lipids, dendrimers, or polymers can either be bound to an iRNA, or induced to form a vesicle or micelle (see e.g., Kim S H, et al (2008) Journal of Controlled Release 129 (2): 107-116) that encases an iRNA. The formation of vesicles or micelles further prevents degradation of the iRNA when administered systemically. Methods for making and administering cationic-iRNA complexes are well within the abilities of one skilled in the art (see e.g., Sorensen, D R, et al (2003) J. Mol. Biol 327:761-766; Verma, U N, et al (2003) Clin. Cancer Res. 9:1291-1300; Arnold, A S et al (2007) J. Hypertens. 25:197-205, which are incorporated herein by reference in their entirety). Some non-limiting examples of drug delivery systems useful for systemic delivery of iRNAs include DOTAP (Sorensen, D R., et al (2003), supra; Verma, U N, et al (2003), supra), Oligofectamine, “solid nucleic acid lipid particles” (Zimmermann, T S, et al (2006) Nature 441:111-114), cardiolipin (Chien, P Y, et al (2005) Cancer Gene Ther. 12:321-328; Pal, A, et al (2005) Int J. Oncol. 26:1087-1091), polyethyleneimine (Bonnet M E, et al (2008) Pharm. Res. August 16 Epub ahead of print; Aigner, A. (2006) J. Biomed. Biotechnol. 71659), Arg-Gly-Asp (RGD) peptides (Liu, S. (2006) Mol. Pharm. 3:472-487), and polyamidoamines (Tomalia, D A, et al (2007) Biochem. Soc. Trans. 35:61-67; Yoo, H., et al (1999) Pharm. Res. 16:1799-1804). In some embodiments, an iRNA forms a complex with cyclodextrin for systemic administration. Methods for administration and pharmaceutical compositions of iRNAs and cyclodextrins can be found in U.S. Pat. No. 7,427,605, which is herein incorporated by reference in its entirety.

A. Vector encoded iRNAs of the Invention

[0536] iRNA targeting the HMGB1 gene can be expressed from transcription units inserted into DNA or RNA vectors (see, e.g., Couture, A, et al., TIG. (1996), 12:5-10; Skillern, A, et al., PCT Publication No. WO 00/22113, PCT Publication No. WO 00/22114, and U.S.

[0537] U.S. Pat. No. 6,054,299). Expression can be transient (on the order of hours to weeks) or sustained (weeks to months or longer), depending upon the specific construct used and the target tissue or cell type. These transgenes can be introduced as a linear construct, a circular plasmid, or a viral vector, which can be an integrating or non-integrating vector. The transgene can also be constructed to permit it to be inherited as an extrachromosomal plasmid (Gassmann, et al., Proc. Natl. Acad. Sci. USA (1995) 92:1292).

[0538] The individual strand or strands of an iRNA can be transcribed from a promoter on an expression vector. Where two separate strands are to be expressed to generate, for example, a dsRNA, two separate expression vectors can be co-introduced (e.g., by transfection or infection) into a target cell. Alternatively each individual strand of a dsRNA can be transcribed by promoters both of which are located on the same expression plasmid. In one embodiment, a dsRNA is expressed as inverted repeat polynucleotides joined by a linker polynucleotide sequence such that the dsRNA has a stem and loop structure.

[0539] iRNA expression vectors are generally DNA plasmids or viral vectors. Expression vectors compatible with eukaryotic cells, preferably those compatible with vertebrate cells, can be used to produce recombinant constructs for the expression of an iRNA as described herein. Eukaryotic cell expression vectors are well known in the art and are available from a number of commercial sources. Typically, such vectors are provided containing convenient restriction sites for insertion of the desired nucleic acid segment. Delivery of iRNA expressing vectors can be systemic, such as by intravenous or intramuscular administration, by administration to target cells ex-planted from the patient followed by reintroduction into the patient, or by any other means that allows for introduction into a desired target cell.

[0540] Viral vector systems which can be utilized with the methods and compositions described herein include, but are not limited to, (a) adenovirus vectors; (b) retrovirus vectors, including but not limited to lentiviral vectors, moloney murine leukemia virus, etc.;

[0541] (c) adeno-associated virus vectors; (d) herpes simplex virus vectors; (e) SV 40 vectors; (f) polyoma virus vectors; (g) papilloma virus vectors; (h) picornavirus vectors; (i) pox virus vectors such as an orthopox, e.g., vaccinia virus vectors or avipox, e.g. canary pox or fowl pox; and (j) a helper-dependent or gutless adenovirus. Replication-defective viruses can also be advantageous. Different vectors will or will not become incorporated into the cells' genome. The constructs can include viral sequences for transfection, if desired. Alternatively, the construct can be incorporated into vectors capable of episomal replication, e.g. EPV and EBV vectors. Constructs for the recombinant expression of an iRNA will generally require regulatory elements, e.g., promoters, enhancers, etc., to ensure the expression of the iRNA in target cells. Other aspects to consider for vectors and constructs are known in the art.

### V. Pharmaceutical Compositions of the Invention

[0542] The present invention also includes pharmaceutical compositions and formulations which include the iRNAs of the invention. In one embodiment, provided herein are pharmaceutical compositions containing an iRNA, as described herein, and a pharmaceutically acceptable carrier. The pharmaceutical compositions containing the iRNA are useful for preventing or treating an HMGB1-associated disorder, e.g., metabolic disorder or NAFLD, e.g., NASH. Such pharmaceutical compositions are formulated based on the mode of delivery. One example is compositions that are formulated for systemic administration via parenteral delivery, e.g., by subcutaneous (SC), intramuscular (IM), or intravenous (IV) delivery. The pharmaceutical compositions of the invention may be administered in dosages sufficient to inhibit expression of an HMGB1 gene.

[0543] The pharmaceutical compositions of the invention may be administered in dosages sufficient to inhibit expression of an HMGB1 gene. In general, a suitable dose of an iRNA of the invention will be in the range of about 0.001 to about 200.0 milligrams per kilogram body weight of the recipient per day, generally in the range of about 1 to 50 mg per kilogram body weight per day. Typically, a suitable dose of an iRNA of the invention will be in the range of about 0.1 mg/kg to about 5.0 mg/kg, preferably about 0.3 mg/kg and about 3.0 mg/kg. A repeat-dose regimen may include administration of a therapeutic amount of iRNA on a regular basis, such as every month, once every 3-6 months, or once a year. In certain embodiments, the iRNA is administered about once per month to about once per six months.

[0544] After an initial treatment regimen, the treatments can be administered on a less frequent basis. Duration of treatment can be determined based on the severity of disease.

[0545] In other embodiments, a single dose of the pharmaceutical compositions can be long lasting, such that doses are administered at not more than 1, 2, 3, or 4 month intervals. In some embodiments of the invention, a single dose of the pharmaceutical compositions of the invention is administered about once per month. In other embodiments of the invention, a single dose of the pharmaceutical compositions of the invention is administered quarterly (i.e., about every three months). In other embodiments of the invention, a single dose of the pharmaceutical compositions of the invention is administered twice per year (i.e., about once every six months).

[0546] The skilled artisan will appreciate that certain factors can influence the dosage and timing required to effectively treat a subject, including but not limited to mutations present in the subject, previous treatments, the general health or age of the subject, and other diseases present. Moreover, treatment of a subject with a prophylactically or therapeutically effective amount, as appropriate, of a composition can include a single treatment or a series of treatments.

[0547] The pharmaceutical compositions of the present invention can be administered in a number of ways depending upon whether local or systemic treatment is desired and upon the area to be treated. Administration can be topical (e.g., by a transdermal patch), pulmonary, e.g., by inhalation or insufflation of powders or aerosols, including by nebulizer; intratracheal, intranasal, epidermal and transdermal, oral or parenteral. Parenteral administration includes intravenous, intraarterial, subcutaneous, intraperitoneal, or intramuscular injection or infusion; subdermal, e.g., via an implanted device; or intracranial, e.g., by intraparenchymal, intrathecal or intraventricular administration.

[0548] The iRNA can be delivered in a manner to target a particular tissue (e.g., hepatocytes).

[0549] Pharmaceutical compositions and formulations for topical or transdermal administration can include transdermal patches, ointments, lotions, creams, gels, drops, suppositories, sprays, liquids, and powders. Conventional pharmaceutical carriers, aqueous, powder or oily bases, thickeners and the like can be necessary or desirable. Coated condoms, gloves and the like can also be useful. Suitable topical formulations include those in which the iRNAs featured in the invention are in admixture with a topical delivery agent such as lipids, liposomes, fatty acids, fatty acid esters, steroids, chelating agents and surfactants. Suitable lipids and liposomes include neutral (e.g., dioleoylphosphatidyl DOPE ethanolamine, dimyristoylphosphatidyl choline DMPC, distearolyphosphatidyl choline) negative (e.g., dimyristoylphosphatidyl glycerol DMPG) and cationic (e.g., dioleoyltetramethylaminopropyl DOTAP and dioleoylphosphatidyl ethanolamine DOTMA). iRNAs featured in the invention can be encapsulated within liposomes or can form complexes thereto, in particular to cationic liposomes. Alternatively, iRNAs can be complexed to lipids, in particular to cationic lipids. Suitable fatty acids and esters include but are not limited to arachidonic acid, oleic acid, eicosanoic acid, lauric acid, caprylic acid, capric acid, myristic acid, palmitic acid, stearic acid, linoleic acid, linolenic acid, dicaprate, tricaprate, monoolein, dilaurin, glyceryl 1-monocaprate, 1-dodecylazacycloheptan-2-one, an acylcarnitine, an acylcholine, or a C1-20 alkyl ester (e.g., isopropylmyristate IPM), monoglyceride, diglyceride or pharmaceutically acceptable salt thereof). Topical formulations are described in detail in U.S. Pat. No. 6,747,014, which is incorporated herein by reference.

[0550] Compositions and formulations for oral administration include powders or granules, microparticulates, nanoparticulates, suspensions or solutions in water or non-aqueous media, capsules, gel capsules, sachets, tablets or minitablets. Thickeners, flavoring agents, diluents, emulsifiers, dispersing aids, or binders can be desirable. In some embodiments, oral formulations are those in which dsRNAs featured in the invention are administered in conjunction with one or more penetration enhancer surfactants and chelators. Suitable surfactants include fatty acids or esters or salts thereof, bile acids or salts thereof. Suitable bile acids/salts include chenodeoxycholic acid (CDCA) and ursodeoxychenodeoxycholic acid (UDCA), cholic acid, dehydrocholic acid, deoxycholic acid, glucholic acid, glycholic acid, glycodeoxycholic acid, taurocholic acid, taurodeoxycholic acid, sodium tauro-24,25-dihydro-fusidate and sodium glycodihydrofusidate. Suitable fatty acids include arachidonic acid, undecanoic acid, oleic acid, lauric acid, caprylic acid, capric acid, myristic acid, palmitic acid, stearic acid, linoleic acid, linolenic acid, dicaprate, tricaprate, monoolein, dilaurin, glyceryl 1-monocaprate, 1-dodecylazacycloheptan-2-one, an acylcarnitine, an acylcholine, or a monoglyceride, a diglyceride or a pharmaceutically acceptable salt thereof (e.g., sodium). In some embodiments, combinations of penetration enhancers are used, for example, fatty acids/salts in combination with bile acids/salts. One exemplary combination is the sodium salt of lauric acid, capric acid and UDCA. Further penetration enhancers include polyoxyethylene-9-lauryl ether, polyoxyethylene-20-cetyl ether. DsRNAs featured in the invention can be delivered orally, in granular form including sprayed dried particles, or complexed to form micro or nanoparticles. DsRNA complexing agents include poly-amino acids; polyimines; polyacrylates; polyalkylacrylates, polyoxethanes, polyalkylcyanoacrylates; cationized gelatins, albumins, starches, acrylates, polyethyleneglycols (PEG), and starches; polyalkylcyanoacrylates; DEAE-derivatized polyimines, pollulans, celluloses, and starches. Suitable complexing agents include chitosan, N-trimethylchitosan, poly-L-lysine, polyhistidine, polyornithine, polyspermines, protamine, polyvinylpyridine, polythiodiethylaminomethylethyleneP(TDAE), polyaminostyrene (e.g., p-amino), poly(methylcyanoacrylate), poly(ethylcyanoacrylate), poly(butylcyanoacrylate), poly(isobutylcyanoacrylate), poly(isohexylcynaoacrylate), DEAE-methacrylate, DEAE-hexylacrylate, DEAE-acrylamide, DEAE-albumin and DEAE-dextran, polymethylacrylate, polyhexylacrylate, poly(D,L-lactic acid), poly(DL-lactic-co-glycolic acid (PLGA), alginate, and polyethyleneglycol (PEG). Oral formulations for dsRNAs and their preparation are described in detail in U.S. Pat. No. 6,887,906, U.S. Publn. No. 20030027780, and U.S. Pat. No. 6,747,014, each of which is incorporated herein by reference.

[0551] Compositions and formulations for parenteral, intraparenchymal (into the brain), intrathecal, intraventricular or intrahepatic administration can include sterile aqueous solutions which can also contain buffers, diluents, and other suitable additives such as, but not limited to, penetration enhancers, carrier compounds, and other pharmaceutically acceptable carriers or excipients.

[0552] Pharmaceutical compositions of the present invention include, but are not limited to, solutions, emulsions, and liposome-containing formulations. These compositions can be generated from a variety of components that include, but are not limited to, preformed liquids, self-emulsifying solids, and self-emulsifying semisolids. Formulations include those that target the liver.

[0553] The pharmaceutical formulations of the present invention, which can conveniently be presented in unit dosage form, can be prepared according to conventional techniques well known in the pharmaceutical industry. Such techniques include the step of bringing into association the active ingredients with the pharmaceutical carrier(s) or excipient(s). In general, the formulations are prepared by uniformly and intimately bringing into association the active ingredients with liquid carriers or finely divided solid carriers or both, and then, if necessary, shaping the product.

[0554] The compositions of the present invention can be formulated into any of many possible dosage forms such as, but not limited to, tablets, capsules, gel capsules, liquid syrups, soft gels, suppositories, and enemas. The compositions of the present invention can also be formulated as suspensions in aqueous, non-aqueous or mixed media. Aqueous suspensions can further contain substances which increase the viscosity of the suspension including, for example, sodium carboxymethylcellulose, sorbitol or dextran. The suspension can also contain stabilizers.

### A. Additional Formulations

i. Emulsions

[0555] The compositions of the present invention can be prepared and formulated as emulsions. Emulsions are typically heterogeneous systems of one liquid dispersed in another in the form of droplets usually exceeding 0.1 μm in diameter (see e.g., Ansel's Pharmaceutical Dosage Forms and Drug Delivery Systems, Allen, LV., Popovich N G., and Ansel H C., 2004, Lippincott Williams & Wilkins (8th ed.), New York, NY; Idson, in Pharmaceutical Dosage Forms, Lieberman, Rieger and Banker (Eds.), 1988, Marcel Dekker, Inc., New York, N.Y., volume 1, p. 199; Rosoff, in Pharmaceutical Dosage Forms, Lieberman, Rieger and Banker (Eds.), 1988, Marcel Dekker, Inc., New York, N.Y., Volume 1, p. 245; Block in Pharmaceutical Dosage Forms, Lieberman, Rieger and Banker (Eds.), 1988, Marcel Dekker, Inc., New York, N.Y., volume 2, p. 335; Higuchi et al., in Remington's Pharmaceutical Sciences, Mack Publishing Co., Easton, Pa., 1985, p. 301). Emulsions are often biphasic systems comprising two immiscible liquid phases intimately mixed and dispersed with each other. In general, emulsions can be of either the water-in-oil (w/o) or the oil-in-water (o/w) variety. When an aqueous phase is finely divided into and dispersed as minute droplets into a bulk oily phase, the resulting composition is called a water-in-oil (w/o) emulsion. Alternatively, when an oily phase is finely divided into and dispersed as minute droplets into a bulk aqueous phase, the resulting composition is called an oil-in-water (o/w) emulsion. Emulsions can contain additional components in addition to the dispersed phases, and the active drug which can be present as a solution either in the aqueous phase, oily phase or itself as a separate phase. Pharmaceutical excipients such as emulsifiers, stabilizers, dyes, and anti-oxidants can also be present in emulsions as needed. Pharmaceutical emulsions can also be multiple emulsions that are comprised of more than two phases such as, for example, in the case of oil-in-water-in-oil (o/w/o) and water-in-oil-in-water (w/o/w) emulsions. Such complex formulations often provide certain advantages that simple binary emulsions do not. Multiple emulsions in which individual oil droplets of an o/w emulsion enclose small water droplets constitute a w/o/w emulsion. Likewise a system of oil droplets enclosed in globules of water stabilized in an oily continuous phase provides an o/w/o emulsion.

[0556] Emulsions are characterized by little or no thermodynamic stability. Often, the dispersed or discontinuous phase of the emulsion is well dispersed into the external or continuous phase and maintained in this form through the means of emulsifiers or the viscosity of the formulation. Either of the phases of the emulsion can be a semisolid or a solid, as is the case of emulsion-style ointment bases and creams. Other means of stabilizing emulsions entail the use of emulsifiers that can be incorporated into either phase of the emulsion. Emulsifiers can broadly be classified into four categories: synthetic surfactants, naturally occurring emulsifiers, absorption bases, and finely dispersed solids (see e.g., Ansel's Pharmaceutical Dosage Forms and Drug Delivery Systems, Allen, LV., Popovich N G., and Ansel H C., 2004, Lippincott Williams & Wilkins (8th ed.), New York, NY; Idson, in Pharmaceutical Dosage Forms, Lieberman, Rieger and Banker (Eds.), 1988, Marcel Dekker, Inc., New York, N.Y., volume 1, p. 199).

[0557] Synthetic surfactants, also known as surface active agents, have found wide applicability in the formulation of emulsions and have been reviewed in the literature (see e.g., Ansel's Pharmaceutical Dosage Forms and Drug Delivery Systems, Allen, LV., Popovich N G., and Ansel H C., 2004, Lippincott Williams & Wilkins (8th ed.), New York, NY; Rieger, in Pharmaceutical Dosage Forms, Lieberman, Rieger and Banker (Eds.), 1988, Marcel Dekker, Inc., New York, N.Y., volume 1, p. 285; Idson, in Pharmaceutical Dosage Forms, Lieberman, Rieger and Banker (Eds.), Marcel Dekker, Inc., New York, N.Y., 1988, volume 1, p. 199). Surfactants are typically amphiphilic and comprise a hydrophilic and a hydrophobic portion. The ratio of the hydrophilic to the hydrophobic nature of the surfactant has been termed the hydrophile/lipophile balance (HLB) and is a valuable tool in categorizing and selecting surfactants in the preparation of formulations. Surfactants can be classified into different classes based on the nature of the hydrophilic group: nonionic, anionic, cationic, and amphoteric (see e.g., Ansel's Pharmaceutical Dosage Forms and Drug Delivery Systems, Allen, LV., Popovich N G., and Ansel H C., 2004, Lippincott Williams & Wilkins (8th ed.), New York, NY Rieger, in Pharmaceutical Dosage Forms, Lieberman, Rieger and Banker (Eds.), 1988, Marcel Dekker, Inc., New York, N.Y., volume 1, p. 285).

[0558] Naturally occurring emulsifiers used in emulsion formulations include lanolin, beeswax, phosphatides, lecithin, and acacia. Absorption bases possess hydrophilic properties such that they can soak up water to form w/o emulsions yet retain their semisolid consistencies, such as anhydrous lanolin and hydrophilic petrolatum. Finely divided solids have also been used as good emulsifiers especially in combination with surfactants and in viscous preparations. These include polar inorganic solids, such as heavy metal hydroxides, nonswelling clays such as bentonite, attapulgite, hectorite, kaolin, montmorillonite, colloidal aluminum silicate, and colloidal magnesium aluminum silicate, pigments and nonpolar solids such as carbon or glyceryl tristearate.

[0559] A large variety of non-emulsifying materials are also included in emulsion formulations and contribute to the properties of emulsions. These include fats, oils, waxes, fatty acids, fatty alcohols, fatty esters, humectants, hydrophilic colloids, preservatives, and antioxidants (Block, in Pharmaceutical Dosage Forms, Lieberman, Rieger and Banker (Eds.), 1988, Marcel Dekker, Inc., New York, N.Y., volume 1, p. 335; Idson, in Pharmaceutical Dosage Forms, Lieberman, Rieger and Banker (Eds.), 1988, Marcel Dekker, Inc., New York, N.Y., volume 1, p. 199).

[0560] Hydrophilic colloids or hydrocolloids include naturally occurring gums and synthetic polymers such as polysaccharides (for example, acacia, agar, alginic acid, carrageenan, guar gum, karaya gum, and tragacanth), cellulose derivatives (for example, carboxymethylcellulose and carboxypropylcellulose), and synthetic polymers (for example, carbomers, cellulose ethers, and carboxyvinyl polymers). These disperse or swell in water to form colloidal solutions that stabilize emulsions by forming strong interfacial films around the dispersed-phase droplets and by increasing the viscosity of the external phase.

[0561] Since emulsions often contain a number of ingredients such as carbohydrates, proteins, sterols, and phosphatides that can readily support the growth of microbes, these formulations often incorporate preservatives. Commonly used preservatives included in emulsion formulations include methyl paraben, propyl paraben, quaternary ammonium salts, benzalkonium chloride, esters of p-hydroxybenzoic acid, and boric acid. Antioxidants are also commonly added to emulsion formulations to prevent deterioration of the formulation. Antioxidants used can be free radical scavengers such as tocopherols, alkyl gallates, butylated hydroxyanisole, butylated hydroxytoluene, or reducing agents such as ascorbic acid and sodium metabisulfite, and antioxidant synergists such as citric acid, tartaric acid, and lecithin.

[0562] The application of emulsion formulations via dermatological, oral, and parenteral routes, and methods for their manufacture have been reviewed in the literature (see e.g., Ansel's Pharmaceutical Dosage Forms and Drug Delivery Systems, Allen, LV., Popovich N G., and Ansel H C., 2004, Lippincott Williams & Wilkins (8th ed.), New York, NY; Idson, in Pharmaceutical Dosage Forms, Lieberman, Rieger and Banker (Eds.), 1988, Marcel Dekker, Inc., New York, N.Y., volume 1, p. 199). Emulsion formulations for oral delivery have been very widely used because of ease of formulation, as well as efficacy from an absorption and bioavailability standpoint (see e.g., Ansel's Pharmaceutical Dosage Forms and Drug Delivery Systems, Allen, LV., Popovich N G., and Ansel H C., 2004, Lippincott Williams & Wilkins (8th ed.), New York, NY; Rosoff, in Pharmaceutical Dosage Forms, Lieberman, Rieger and Banker (Eds.), 1988, Marcel Dekker, Inc., New York, N.Y., volume 1, p. 245; Idson, in Pharmaceutical Dosage Forms, Lieberman, Rieger and Banker (Eds.), 1988, Marcel Dekker, Inc., New York, N.Y., volume 1, p. 199). Mineral-oil base laxatives, oil-soluble vitamins, and high fat nutritive preparations are among the materials that have commonly been administered orally as o/w emulsions.

ii. Microemulsions

[0563] In one embodiment of the present invention, the compositions of iRNAs and nucleic acids are formulated as microemulsions. A microemulsion can be defined as a system of water, oil, and amphiphile which is a single optically isotropic and thermodynamically stable liquid solution (see e.g., Ansel's Pharmaceutical Dosage Forms and Drug Delivery Systems, Allen, LV., Popovich N G., and Ansel H C., 2004, Lippincott Williams & Wilkins (8th ed.), New York, NY; Rosoff, in Pharmaceutical Dosage Forms, Lieberman, Rieger and Banker (Eds.), 1988, Marcel Dekker, Inc., New York, N.Y., volume 1, p. 245). Typically microemulsions are systems that are prepared by first dispersing an oil in an aqueous surfactant solution and then adding a sufficient amount of a fourth component, generally an intermediate chain-length alcohol to form a transparent system. Therefore, microemulsions have also been described as thermodynamically stable, isotropically clear dispersions of two immiscible liquids that are stabilized by interfacial films of surface-active molecules (Leung and Shah, in: Controlled Release of Drugs: Polymers and Aggregate Systems, Rosoff, M., Ed., 1989, VCH Publishers, New York, pages 185-215). Microemulsions commonly are prepared via a combination of three to five components that include oil, water, surfactant, cosurfactant and electrolyte. Whether the microemulsion is of the water-in-oil (w/o) or an oil-in-water (o/w) type is dependent on the properties of the oil and surfactant used and on the structure and geometric packing of the polar heads and hydrocarbon tails of the surfactant molecules (Schott, in Remington's Pharmaceutical Sciences, Mack Publishing Co., Easton, Pa., 1985, p. 271).

[0564] The phenomenological approach utilizing phase diagrams has been extensively studied and has yielded a comprehensive knowledge, to one skilled in the art, of how to formulate microemulsions (see e.g., Ansel's Pharmaceutical Dosage Forms and Drug Delivery Systems, Allen, LV., Popovich N G., and Ansel H C., 2004, Lippincott Williams & Wilkins (8th ed.), New York, NY; Rosoff, in Pharmaceutical Dosage Forms, Lieberman, Rieger and Banker (Eds.), 1988, Marcel Dekker, Inc., New York, N.Y., volume 1, p. 245; Block, in Pharmaceutical Dosage Forms, Lieberman, Rieger and Banker (Eds.), 1988, Marcel Dekker, Inc., New York, N.Y., volume 1, p. 335). Compared to conventional emulsions, microemulsions offer the advantage of solubilizing water-insoluble drugs in a formulation of thermodynamically stable droplets that are formed spontaneously.

[0565] Surfactants used in the preparation of microemulsions include, but are not limited to, ionic surfactants, non-ionic surfactants, Brij® 96, polyoxyethylene oleyl ethers, polyglycerol fatty acid esters, tetraglycerol monolaurate (ML310), tetraglycerol monooleate (MO310), hexaglycerol monooleate (PO310), hexaglycerol pentaoleate (PO500), decaglycerol monocaprate (MCA750), decaglycerol monooleate (MO750), decaglycerol sequioleate (SO₇₅₀), decaglycerol decaoleate (DAO750), alone or in combination with cosurfactants. The cosurfactant, usually a short-chain alcohol such as ethanol, 1-propanol, and 1-butanol, serves to increase the interfacial fluidity by penetrating into the surfactant film and consequently creating a disordered film because of the void space generated among surfactant molecules. Microemulsions can, however, be prepared without the use of cosurfactants and alcohol-free self-emulsifying microemulsion systems are known in the art. The aqueous phase can typically be, but is not limited to, water, an aqueous solution of the drug, glycerol, PEG300, PEG400, polyglycerols, propylene glycols, and derivatives of ethylene glycol. The oil phase can include, but is not limited to, materials such as Captex® 300, Captex® 355, Capmul® MCM, fatty acid esters, medium chain (C8—C12) mono, di, and tri-glycerides, polyoxyethylated glyceryl fatty acid esters, fatty alcohols, polyglycolized glycerides, saturated polyglycolized C8—C10 glycerides, vegetable oils, and silicone oil.

[0566] Microemulsions are particularly of interest from the standpoint of drug solubilization and the enhanced absorption of drugs. Lipid based microemulsions (both o/w and w/o) have been proposed to enhance the oral bioavailability of drugs, including peptides (see e.g., U.S. Pat. Nos. 6,191,105; 7,063,860; 7,070,802; 7,157,099; Constantinides et al., Pharmaceutical Research, 1994, 11, 1385-1390; Ritschel, Meth. Find. Exp. Clin. Pharmacol., 1993, 13, 205). Microemulsions afford advantages of improved drug solubilization, protection of drug from enzymatic hydrolysis, possible enhancement of drug absorption due to surfactant-induced alterations in membrane fluidity and permeability, ease of preparation, ease of oral administration over solid dosage forms, improved clinical potency, and decreased toxicity (see e.g., U.S. Pat. Nos. 6,191,105; 7,063,860; 7,070,802; 7,157,099; Constantinides et al., Pharmaceutical Research, 1994, 11, 1385; Ho et al., J. Pharm. Sci., 1996, 85, 138-143). Often microemulsions can form spontaneously when their components are brought together at ambient temperature. This can be particularly advantageous when formulating thermolabile drugs, peptides or iRNAs. Microemulsions have also been effective in the transdermal delivery of active components in both cosmetic and pharmaceutical applications. It is expected that the microemulsion compositions and formulations of the present invention will facilitate the increased systemic absorption of iRNAs and nucleic acids from the gastrointestinal tract, as well as improve the local cellular uptake of iRNAs and nucleic acids.

[0567] Microemulsions of the present invention can also contain additional components and additives such as sorbitan monostearate (Grill® 3), Labrasol®, and penetration enhancers to improve the properties of the formulation and to enhance the absorption of the iRNAs and nucleic acids of the present invention. Penetration enhancers used in the microemulsions of the present invention can be classified as belonging to one of five broad categories--surfactants, fatty acids, bile salts, chelating agents, and non-chelating non-surfactants (Lee et al., Critical Reviews in Therapeutic Drug Carrier Systems, 1991, p. 92). Each of these classes has been discussed above.

iii. Microparticles

[0568] An iRNA of the invention may be incorporated into a particle, e.g., a microparticle. Microparticles can be produced by spray-drying, but may also be produced by other methods including lyophilization, evaporation, fluid bed drying, vacuum drying, or a combination of these techniques.

iv. Penetration Enhancers

[0569] In one embodiment, the present invention employs various penetration enhancers to effect the efficient delivery of nucleic acids, particularly iRNAs, to the skin of animals. Most drugs are present in solution in both ionized and nonionized forms. However, usually only lipid soluble or lipophilic drugs readily cross cell membranes. It has been discovered that even non-lipophilic drugs can cross cell membranes if the membrane to be crossed is treated with a penetration enhancer. In addition to aiding the diffusion of non-lipophilic drugs across cell membranes, penetration enhancers also enhance the permeability of lipophilic drugs.

[0570] Penetration enhancers can be classified as belonging to one of five broad categories, i.e., surfactants, fatty acids, bile salts, chelating agents, and non-chelating non-surfactants (see e.g., Malmsten, M. Surfactants and polymers in drug delivery, Informa Health Care, New York, NY, 2002; Lee et al., Critical Reviews in Therapeutic Drug Carrier Systems, 1991, p.92).

[0571] Each of the above mentioned classes of penetration enhancers are described below in greater detail.

[0572] Surfactants (or “surface-active agents”) are chemical entities which, when dissolved in an aqueous solution, reduce the surface tension of the solution or the interfacial tension between the aqueous solution and another liquid, with the result that absorption of iRNAs through the mucosa is enhanced. In addition to bile salts and fatty acids, these penetration enhancers include, for example, sodium lauryl sulfate, polyoxyethylene-9-lauryl ether and polyoxyethylene-20-cetyl ether) (see e.g., Malmsten, M. Surfactants and polymers in drug delivery, Informa Health Care, New York, NY, 2002; Lee et al., Critical Reviews in Therapeutic Drug Carrier Systems, 1991, p.92); and perfluorochemical emulsions, such as FC-43. Takahashi et al., J. Pharm. Pharmacol., 1988, 40, 252).

[0573] Various fatty acids and their derivatives which act as penetration enhancers include, for example, oleic acid, lauric acid, capric acid (n-decanoic acid), myristic acid, palmitic acid, stearic acid, linoleic acid, linolenic acid, dicaprate, tricaprate, monoolein (1-monooleoyl-rac-glycerol), dilaurin, caprylic acid, arachidonic acid, glycerol 1-monocaprate, 1-dodecylazacycloheptan-2-one, acylcarnitines, acylcholines, C1-20 alkyl esters thereof (e.g., methyl, isopropyl and t-butyl), and mono- and di-glycerides thereof (i.e., oleate, laurate, caprate, myristate, palmitate, stearate, linoleate, etc.) (see e.g., Touitou, E., et al. Enhancement in Drug Delivery, CRC Press, Danvers, MA, 2006; Lee et al., Critical Reviews in Therapeutic Drug Carrier Systems, 1991, p.92; Muranishi, Critical Reviews in Therapeutic Drug Carrier Systems, 1990, 7, 1-33; El Hariri et al., J. Pharm. Pharmacol., 1992, 44, 651-654).

[0574] The physiological role of bile includes the facilitation of dispersion and absorption of lipids and fat-soluble vitamins (see e.g., Malmsten, M. Surfactants and polymers in drug delivery, Informa Health Care, New York, NY, 2002; Brunton, Chapter 38 in: Goodman & Gilman's The Pharmacological Basis of Therapeutics, 9th Ed., Hardman et al. Eds., McGraw-Hill, New York, 1996, pp. 934-935). Various natural bile salts, and their synthetic derivatives, act as penetration enhancers. Thus the term “bile salts” includes any of the naturally occurring components of bile as well as any of their synthetic derivatives. Suitable bile salts include, for example, cholic acid (or its pharmaceutically acceptable sodium salt, sodium cholate), dehydrocholic acid (sodium dehydrocholate), deoxycholic acid (sodium deoxycholate), glucholic acid (sodium glucholate), glycholic acid (sodium glycocholate), glycodeoxycholic acid (sodium glycodeoxycholate), taurocholic acid (sodium taurocholate), taurodeoxycholic acid (sodium taurodeoxycholate), chenodeoxycholic acid (sodium chenodeoxycholate), ursodeoxycholic acid (UDCA), sodium tauro-24,25-dihydro-fusidate (STDHF), sodium glycodihydrofusidate and polyoxyethylene-9-lauryl ether (POE) (see e.g., Malmsten, M. Surfactants and polymers in drug delivery, Informa Health Care, New York, NY, 2002; Lee et al., Critical Reviews in Therapeutic Drug Carrier Systems, 1991, page 92; Swinyard, Chapter 39 In: Remington's Pharmaceutical Sciences, 18th Ed., Gennaro, ed., Mack Publishing Co., Easton, Pa., 1990, pages 782-783; Muranishi, Critical Reviews in Therapeutic Drug Carrier Systems, 1990, 7, 1-33; Yamamoto et al., J. Pharm. Exp. Ther., 1992, 263, 25; Yamashita et al., J. Pharm. Sci., 1990, 79, 579-583).

[0575] Chelating agents, as used in connection with the present invention, can be defined as compounds that remove metallic ions from solution by forming complexes therewith, with the result that absorption of iRNAs through the mucosa is enhanced. With regards to their use as penetration enhancers in the present invention, chelating agents have the added advantage of also serving as DNase inhibitors, as most characterized DNA nucleases require a divalent metal ion for catalysis and are thus inhibited by chelating agents (Jarrett, J. Chromatogr., 1993, 618, 315-339). Suitable chelating agents include but are not limited to disodium ethylenediaminetetraacetate (EDTA), citric acid, salicylates (e.g., sodium salicylate, 5-methoxysalicylate and homovanilate), N-acyl derivatives of collagen, laureth-9 and N-amino acyl derivatives of beta-diketones (enamines) (see e.g., Katdare, A. et al., Excipient development for pharmaceutical, biotechnology, and drug delivery, CRC Press, Danvers, MA, 2006; Lee et al., Critical Reviews in Therapeutic Drug Carrier Systems, 1991, page 92; Muranishi, Critical Reviews in Therapeutic Drug Carrier Systems, 1990, 7, 1-33; Buur et al., J. Control Rel., 1990, 14, 43-51).

[0576] As used herein, non-chelating non-surfactant penetration enhancing compounds can be defined as compounds that demonstrate insignificant activity as chelating agents or as surfactants but that nonetheless enhance absorption of iRNAs through the alimentary mucosa (see e.g., Muranishi, Critical Reviews in Therapeutic Drug Carrier Systems, 1990, 7, 1-33). This class of penetration enhancers includes, for example, unsaturated cyclic ureas, 1-alkyl- and 1-alkenylazacyclo-alkanone derivatives (Lee et al., Critical Reviews in Therapeutic Drug Carrier Systems, 1991, page 92); and non-steroidal anti-inflammatory agents such as diclofenac sodium, indomethacin and phenylbutazone (Yamashita et al., J. Pharm. Pharmacol., 1987, 39, 621-626).

[0577] Agents that enhance uptake of iRNAs at the cellular level can also be added to the pharmaceutical and other compositions of the present invention. For example, cationic lipids, such as lipofectin (Junichi et al, U.S. Pat. No. 5,705,188), cationic glycerol derivatives, and polycationic molecules, such as polylysine (Lollo et al., PCT Application WO 97/30731), are also known to enhance the cellular uptake of dsRNAs. Examples of commercially available transfection reagents include, for example Lipofectamine™ (Invitrogen; Carlsbad, CA), Lipofectamine 2000™ (Invitrogen; Carlsbad, CA), 293fectin™ (Invitrogen; Carlsbad, CA), Cellfectin™ (Invitrogen; Carlsbad, CA), DMRIE-C™ (Invitrogen; Carlsbad, CA), FreeStyle™ MAX (Invitrogen; Carlsbad, CA), Lipofectamine™ 2000 CD (Invitrogen; Carlsbad, CA), Lipofectamine™ (Invitrogen; Carlsbad, CA), RNAiMAX (Invitrogen; Carlsbad, CA), Oligofectamine™ (Invitrogen; Carlsbad, CA), Optifect™ (Invitrogen; Carlsbad, CA), X-tremeGENE Q2 Transfection Reagent (Roche; Grenzacherstrasse, Switzerland), DOTAP Liposomal Transfection Reagent (Grenzacherstrasse, Switzerland), DOSPER Liposomal Transfection Reagent (Grenzacherstrasse, Switzerland), or Fugene (Grenzacherstrasse, Switzerland), Transfectam® Reagent (Promega; Madison, WI), TransFast™ Transfection Reagent (Promega; Madison, WI), Tfx™-20 Reagent (Promega; Madison, WI), Tfx™-50 Reagent (Promega; Madison, WI), DreamFect™ (OZ Biosciences; Marseille, France), EcoTransfect (OZ Biosciences; Marseille, France), TransPassª D1 Transfection Reagent (New England Biolabs; Ipswich, MA, USA), LyoVec™/LipoGen™ (Invitrogen; San Diego, CA, USA), PerFectin Transfection Reagent (Genlantis; San Diego, CA, USA), NeuroPORTER Transfection Reagent (Genlantis; San Diego, CA, USA), GenePORTER Transfection reagent (Genlantis; San Diego, CA, USA), GenePORTER 2 Transfection reagent (Genlantis; San Diego, CA, USA), Cytofectin Transfection Reagent (Genlantis; San Diego, CA, USA), BaculoPORTER Transfection Reagent (Genlantis; San Diego, CA, USA), TroganPORTER™ transfection Reagent (Genlantis; San Diego, CA, USA), RiboFect (Bioline; Taunton, MA, USA), PlasFect (Bioline; Taunton, MA, USA), UniFECTOR (B-Bridge International; Mountain View, CA, USA), SureFECTOR (B-Bridge International; Mountain View, CA, USA), or HiFect™ (B-Bridge International, Mountain View, CA, USA), among others.

[0578] Other agents can be utilized to enhance the penetration of the administered nucleic acids, including glycols such as ethylene glycol and propylene glycol, pyrrols such as 2-pyrrol, azones, and terpenes such as limonene and menthone.

v. Carriers

[0579] Certain compositions of the present invention also incorporate carrier compounds in the formulation. As used herein, “carrier compound” or “carrier” can refer to a nucleic acid, or analog thereof, which is inert (i.e., does not possess biological activity per se) but is recognized as a nucleic acid by in vivo processes that reduce the bioavailability of a nucleic acid having biological activity by, for example, degrading the biologically active nucleic acid or promoting its removal from circulation. The co-administration of a nucleic acid and a carrier compound, typically with an excess of the latter substance, can result in a substantial reduction of the amount of nucleic acid recovered in the liver, kidney or other extracirculatory reservoirs, presumably due to competition between the carrier compound and the nucleic acid for a common receptor. For example, the recovery of a partially phosphorothioate dsRNA in hepatic tissue can be reduced when it is coadministered with polyinosinic acid, dextran sulfate, polycytidic acid or 4-acetamido-4′isothiocyano-stilbene-2,2′-disulfonic acid (Miyao et al., DsRNA Res. Dev., 1995, 5, 115-121; Takakura et al., DsRNA & Nucl. Acid Drug Dev., 1996, 6, 177-183.

vi. Excipients

[0580] In contrast to a carrier compound, a “pharmaceutical carrier” or “excipient” is a pharmaceutically acceptable solvent, suspending agent, or any other pharmacologically inert vehicle for delivering one or more nucleic acids to an animal. The excipient can be liquid or solid and is selected, with the planned manner of administration in mind, so as to provide for the desired bulk, consistency, etc., when combined with a nucleic acid and the other components of a given pharmaceutical composition. Typical pharmaceutical carriers include, but are not limited to, binding agents (e.g., pregelatinized maize starch, polyvinylpyrrolidone or hydroxypropyl methylcellulose, etc.); fillers (e.g., lactose and other sugars, microcrystalline cellulose, pectin, gelatin, calcium sulfate, ethyl cellulose, polyacrylates or calcium hydrogen phosphate, etc.); lubricants (e.g., magnesium stearate, talc, silica, colloidal silicon dioxide, stearic acid, metallic stearates, hydrogenated vegetable oils, corn starch, polyethylene glycols, sodium benzoate, sodium acetate, etc.); disintegrants (e.g., starch, sodium starch glycolate, etc.); and wetting agents (e.g., sodium lauryl sulphate, etc).

[0581] Pharmaceutically acceptable organic or inorganic excipients suitable for non-parenteral administration which do not deleteriously react with nucleic acids can also be used to formulate the compositions of the present invention. Suitable pharmaceutically acceptable carriers include, but are not limited to, water, salt solutions, alcohols, polyethylene glycols, gelatin, lactose, amylose, magnesium stearate, talc, silicic acid, viscous paraffin, hydroxymethylcellulose, polyvinylpyrrolidone, and the like.

[0582] Formulations for topical administration of nucleic acids can include sterile and non-sterile aqueous solutions, non-aqueous solutions in common solvents such as alcohols, or solutions of the nucleic acids in liquid or solid oil bases. The solutions can also contain buffers, diluents and other suitable additives. Pharmaceutically acceptable organic or inorganic excipients suitable for non-parenteral administration which do not deleteriously react with nucleic acids can be used.

[0583] Suitable pharmaceutically acceptable excipients include, but are not limited to, water, salt solutions, alcohol, polyethylene glycols, gelatin, lactose, amylose, magnesium stearate, talc, silicic acid, viscous paraffin, hydroxymethylcellulose, polyvinylpyrrolidone, and the like.

vii. Other Components

[0584] The compositions of the present invention can additionally contain other adjunct components conventionally found in pharmaceutical compositions, at their art-established usage levels. Thus, for example, the compositions can contain additional, compatible, pharmaceutically-active materials such as, for example, antipruritics, astringents, local anesthetics or anti-inflammatory agents, or can contain additional materials useful in physically formulating various dosage forms of the compositions of the present invention, such as dyes, flavoring agents, preservatives, antioxidants, opacifiers, thickening agents and stabilizers. However, such materials, when added, should not unduly interfere with the biological activities of the components of the compositions of the present invention. The formulations can be sterilized and, if desired, mixed with auxiliary agents, e.g., lubricants, preservatives, stabilizers, wetting agents, emulsifiers, salts for influencing osmotic pressure, buffers, colorings, flavorings, or aromatic substances, and the like which do not deleteriously interact with the nucleic acid(s) of the formulation.

[0585] Aqueous suspensions can contain substances which increase the viscosity of the suspension including, for example, sodium carboxymethylcellulose, sorbitol, or dextran. The suspension can also contain stabilizers.

[0586] In some embodiments, pharmaceutical compositions featured in the invention include (a) one or more iRNA and (b) one or more agents which function by a non-iRNA mechanism and which are useful in treating a metabolic disorder, e.g., a deficiency in glycemic control.

[0587] Toxicity and prophylactic efficacy of such compounds can be determined by standard pharmaceutical procedures in cell cultures or experimental animals, e.g., for determining the LD50 (the dose lethal to 50% of the population) and the ED50 (the dose prophylactically effective in 50% of the population). The dose ratio between toxic and therapeutic effects is the therapeutic index and it can be expressed as the ratio LD50/ED50. Compounds that exhibit high therapeutic indices are preferred.

[0588] The data obtained from cell culture assays and animal studies can be used in formulating a range of dosage for use in humans. The dosage of compositions featured herein in the invention lies generally within a range of circulating concentrations that include the ED50, preferably an ED80 or ED90, with little or no toxicity. The dosage can vary within this range depending upon the dosage form employed and the route of administration utilized. For any compound used in the methods featured in the invention, the prophylactically effective dose can be estimated initially from cell culture assays. A dose can be formulated in animal models to achieve a circulating plasma concentration range of the compound or, when appropriate, of the polypeptide product of a target sequence (e.g., achieving a decreased concentration of the polypeptide) that includes the IC50 (i.e., the concentration of the test compound which achieves a half-maximal inhibition of symptoms) or higher levels of inhibition as determined in cell culture. Such information can be used to more accurately determine useful doses in humans. Levels in plasma can be measured, for example, by high performance liquid chromatography.

[0589] In addition to their administration, as discussed above, the iRNAs featured in the invention can be administered in combination with other known agents used for the prevention or treatment of a metabolic disorder, e.g., a deficiency in glycemic control. In any event, the administering physician can adjust the amount and timing of iRNA administration on the basis of results observed using standard measures of efficacy known in the art or described herein.

### VI. Methods For Inhibiting HMGB1 Expression

[0590] The present invention also provides methods of inhibiting expression of an HMGB1 gene in a cell. The methods include contacting a cell with an RNAi agent, e.g., double stranded RNA agent, in an amount effective to inhibit expression of HMGB1 in the cell, thereby inhibiting expression of HMGB1 in the cell.

[0591] Contacting of a cell with an iRNA, e.g., a double stranded RNA agent, may be done in vitro or in vivo. Contacting a cell in vitro includes contacting a group of cells in culture. Contacting a cell in vivo with the iRNA includes contacting a cell or group of cells within a subject, e.g., a human subject, with the iRNA. Combinations of in vitro and in vivo methods of contacting a cell are also possible. Contacting a cell may be direct or indirect, as discussed above. Furthermore, contacting a cell may be accomplished via a targeting ligand, including any ligand described herein or known in the art. In preferred embodiments, the targeting ligand is a carbohydrate moiety, e.g., a GalNAc3 ligand, or any other ligand that directs the RNAi agent to a site of interest.

[0592] The term “inhibiting,” as used herein, is used interchangeably with “reducing,” “silencing,” “downregulating”, “suppressing”, and other similar terms, and includes any level of inhibition.

[0593] The phrase “inhibiting expression of an HMGB1” is intended to refer to inhibition of expression of any HMGB1 gene (such as, e.g., a mouse HMGB1 gene, a rat HMGB1 gene, a monkey HMGB1 gene, or a human HMGB1 gene) as well as variants or mutants of an HMGB1 gene. Thus, the HMGB1 gene may be a wild-type HMGB1 gene, a mutant HMGB1 gene, or a transgenic HMGB1 gene in the context of a genetically manipulated cell, group of cells, or organism.

[0594] “Inhibiting expression of an HMGB1 gene” includes any level of inhibition of an HMGB1 gene, e.g., at least partial suppression of the expression of an HMGB1 gene. The expression of the HMGB1 gene may be assessed based on the level, or the change in the level, of any variable associated with HMGB1 gene expression, e.g., HMGB1 mRNA level or HMGB1 protein level. This level may be assessed in an individual cell or in a group of cells, including, for example, a sample derived from a subject. It is understood that HMGB1 is expressed in a number of tissue types in the body, e.g., liver, adrenal, appendix, bne marrow, brain, colon, endometrium, esophagus, fat, gall bladder, heart, kidney, lung, lymph node, ovary, prostate, skin, small intestine, stomach, testis, thyroid, and urinary bladder. HMGB1 RNA associated with vesicular structures is expected to be present in blood, urine, and other body fluids. The level of RNA in blood and urine has been demonstrated to correlate with RNA levels in liver (see, e.g., Sehgal et al., RNA 20:143-149, 2014; Chan et al., Mol. Ther. Nucl. Acids. 4: e263, 2015; both incorporated herein by reference). Further, methods to confirm RNA interference by detection of predicted site specific siRNA cleavage products are known in the art and have been used to demonstrate RNA cleavage in clinical trials (see, e.g., Zimermann et al., Nature. 441:111-114, 2006; Davis et al., Nature. 464:1067-1070, 2010; both incorporated herein by reference). Therefore, the level of knockdown of HMGB1 gene and gene expression in the liver may be greater than the level of knockdown of HMGB1 protein in the blood or HMGB1 RNA associated with vesicular structures in the blood or urine. HMGB 1 is released from liver cells, either actively or passively due to leakage from damaged cells, during liver inflammation. Therefore, a reduction in HMGB1 after treatment may only be observed in comparison to an earlier time point in the same individual, e.g., prior to treatment, or as compared to a level from a diseased population. Such considerations are well understood by those of skill in the art.

[0595] Inhibition may be assessed by a decrease in an absolute or relative level of one or more variables that are associated with HMGB1 expression compared with a control level. The control level may be any type of control level that is utilized in the art, e.g., a pre-dose baseline level, or a level determined from a similar subject, cell, or sample that is untreated or treated with a control (such as, e.g., buffer only control or inactive agent control).

[0596] In some embodiments of the methods of the invention, expression of an HMGB1 gene is inhibited by at least 30%, 35%, 40%, 45%, 50%, 55%, 60%, 65%, 70%, 75%, 80%, 85%, 90%, or 95%, or to below the level of detection of the assay. In preferred embodiments, expression of an HMGB1 gene is inhibited by at least 50%. It is understood that complete or near complete inhibition of HMGB1 may be undesirable. It is further understood that inhibition of HMGB1 expression in certain tissues, e.g., in liver, without a significant inhibition of expression in other tissues, e.g., brain, may be desirable. In preferred embodiments, expression level is determined using the assay method provided in Example 2 with a 10 nM siRNA concentration in the appropriate species matched cell line.

[0597] In certain embodiments, inhibition of expression in vivo is determined by knockdown of the human gene in a rodent expressing the human gene, e.g., an AAV-infected mouse expressing the human target gene (i.e., HMGB1), e.g., when administered a single dose at 3 mg/kg at the nadir of RNA expression. Knockdown of expression of an endogenous gene in a model animal system can also be determined, e.g., after administration of a single dose at 3 mg/kg at the nadir of RNA expression. Such systems are useful when the nucleic acid sequence of the human gene and the model animal gene are sufficiently close such that the human iRNA provides effective knockdown of the model animal gene. RNA expression in liver is determined using the PCR methods provided in Example 2.

[0598] Inhibition of the expression of an HMGB1 gene may be manifested by a reduction of the amount of mRNA expressed by a first cell or group of cells (such cells may be present, for example, in a sample derived from a subject) in which an HMGB1 gene is transcribed and which has or have been treated (e.g., by contacting the cell or cells with an iRNA of the invention, or by administering an iRNA of the invention to a subject in which the cells are or were present) such that the expression of an HMGB1 gene is inhibited, as compared to a second cell or group of cells substantially identical to the first cell or group of cells but which has not or have not been so treated (control cell(s) not treated with an iRNA or not treated with an iRNA targeted to the gene of interest). In preferred embodiments, the inhibition is assessed by the method provided in Example 2 using a 10 nM siRNA concentration in the species matched cell line and expressing the level of mRNA in treated cells as a percentage of the level of mRNA in control cells, using the following formula:

$$\frac{( mRNA in control cells ) - ( mRNA in treated cells )}{( mRNA in control cells )} \cdot 100 \%$$

[0599] In other embodiments, inhibition of the expression of an HMGB1 gene may be assessed in terms of a reduction of a parameter that is functionally linked to an HMGB1 gene expression, e.g., HMGB1 protein level in blood or serum from a subject, RNA level in a blood or urine sample from a subject. HMGB1 gene silencing may be determined in any cell expressing HMGB1, either endogenous or heterologous from an expression construct, and by any assay known in the art.

[0600] Inhibition of the expression of an HMGB1 protein may be manifested by a reduction in the level of the HMGB1 protein that is expressed by a cell or group of cells or in a subject sample (e.g., the level of protein in a blood sample derived from a subject). As explained above, for the assessment of mRNA suppression, the inhibition of protein expression levels in a treated cell or group of cells may similarly be expressed as a percentage of the level of protein in a control cell or group of cells, or the change in the level of protein in a subject sample, e.g., urine or blood, or serum derived therefrom.

[0601] A control cell, a group of cells, or subject sample that may be used to assess the inhibition of the expression of an HMGB1 gene includes a cell, group of cells, or subject sample that has not yet been contacted with an RNAi agent of the invention. For example, the control cell, group of cells, or subject sample may be derived from an individual subject (e.g., a human or animal subject) prior to treatment of the subject with an RNAi agent or an appropriately matched population control.

[0602] The level of HMGB1 mRNA that is expressed by a cell or group of cells may be determined using any method known in the art for assessing mRNA expression. In one embodiment, the level of expression of HMGB1 in a sample is determined by detecting a transcribed polynucleotide, or portion thereof, e.g., mRNA of the HMGB1 gene. RNA may be extracted from cells using RNA extraction techniques including, for example, using acid phenol/guanidine isothiocyanate extraction (RNAzol B; Biogenesis), RNeasy™ RNA preparation kits (Qiagen®) or PAXgene™ (PreAnalytix™, Switzerland). Typical assay formats utilizing ribonucleic acid hybridization include nuclear run-on assays, RT-PCR, RNase protection assays, northern blotting, in situ hybridization, and microarray analysis.

[0603] In some embodiments, the level of expression of HMGB1 is determined using a nucleic acid probe. The term “probe”, as used herein, refers to any molecule that is capable of selectively binding to a specific HMGB1. Probes can be synthesized by one of skill in the art, or derived from appropriate biological preparations. Probes may be specifically designed to be labeled. Examples of molecules that can be utilized as probes include, but are not limited to, RNA, DNA, proteins, antibodies, and organic molecules.

[0604] Isolated mRNA can be used in hybridization or amplification assays that include, but are not limited to, Southern or northern analyses, polymerase chain reaction (PCR) analyses and probe arrays. One method for the determination of mRNA levels involves contacting the isolated mRNA with a nucleic acid molecule (probe) that can hybridize to HMGB1 mRNA. In one embodiment, the mRNA is immobilized on a solid surface and contacted with a probe, for example by running the isolated mRNA on an agarose gel and transferring the mRNA from the gel to a membrane, such as nitrocellulose. In an alternative embodiment, the probe(s) are immobilized on a solid surface and the mRNA is contacted with the probe(s), for example, in an Affymetrix® gene chip array. A skilled artisan can readily adapt known mRNA detection methods for use in determining the level of HMGB1 mRNA.

[0605] An alternative method for determining the level of expression of HMGB1 in a sample involves the process of nucleic acid amplification or reverse transcriptase (to prepare cDNA) of for example mRNA in the sample, e.g., by RT-PCR (the experimental embodiment set forth in Mullis, 1987, U.S. Pat. No. 4,683,202), ligase chain reaction (Barany (1991) Proc. Natl. Acad. Sci. USA 88:189-193), self-sustained sequence replication (Guatelli et al. (1990) Proc. Natl. Acad. Sci. USA 87:1874-1878), transcriptional amplification system (Kwoh et al. (1989) Proc. Natl. Acad. Sci. USA 86:1173-1177), Q-Beta Replicase (Lizardi et al. (1988) Bio/Technology 6:1197), rolling circle replication (Lizardi et al., U.S. Pat. No. 5,854,033) or any other nucleic acid amplification method, followed by the detection of the amplified molecules using techniques well known to those of skill in the art. These detection schemes are especially useful for the detection of nucleic acid molecules if such molecules are present in very low numbers. In particular aspects of the invention, the level of expression of HMGB1 is determined by quantitative fluorogenic RT-PCR (i.e., the TAQMAN™ (TaqMan) System). In certain embodiments, methods to confirm RNA interference by detection of predicted site specific siRNA cleavage products are known in the art and have been used to demonstrate RNA cleavage in clinical trials (see, e.g., Zimermann et al., Nature. 441:111-114, 2006; Davis et al., Nature. 464:1067-1070, 2010; both incorporated herein by reference). In preferred embodiments, expression level is determined by the method provided in Example 2 using a 10 nM siRNA concentration in the species matched cell line.

[0606] The expression levels of HMGB1 mRNA may be monitored using a membrane blot (such as used in hybridization analysis such as northern, Southern, dot, and the like), or microwells, sample tubes, gels, beads or fibers (or any solid support comprising bound nucleic acids). See U.S. Pat. Nos. 5,770,722, 5,874,219, 5,744,305, 5,677,195 and 5,445,934, which are incorporated herein by reference. The determination of HMGB1 expression level may also comprise using nucleic acid probes in solution.

[0607] In preferred embodiments, the level of mRNA expression is assessed using branched DNA (bDNA) assays or real time PCR (qPCR). The use of these methods is described and exemplified in the Examples presented herein. In preferred embodiments, expression level is determined by the method provided in Example 2 using a 10 nM siRNA concentration in the species matched cell line.

[0608] The level of HMGB 1 protein expression may be determined using any method known in the art for the measurement of protein levels. Such methods include, for example, electrophoresis, capillary electrophoresis, high performance liquid chromatography (HPLC), thin layer chromatography (TLC), hyperdiffusion chromatography, fluid or gel precipitin reactions, absorption spectroscopy, a colorimetric assays, spectrophotometric assays, flow cytometry, immunodiffusion (single or double), immunoelectrophoresis, western blotting, radioimmunoassay (RIA), enzyme-linked immunosorbent assays (ELISAs), immunofluorescent assays, electrochemiluminescence assays, and the like.

[0609] In some embodiments, the efficacy of the methods of the invention are assessed by a decrease in HMGB1 mRNA or protein level (e.g., in a liver biopsy, blood, or urine).

[0610] In some embodiments of the methods of the invention, the iRNA is administered to a subject such that the iRNA is delivered to a specific site within the subject. The inhibition of expression of HMGB1 may be assessed using measurements of the level or change in the level of HMGB1 mRNA or HMGB1 protein in a sample derived from fluid or tissue from the specific site within the subject (e.g., liver, blood, or urine).

[0611] As used herein, the terms detecting or determining a level of an analyte are understood to mean performing the steps to determine if a material, e.g., protein, RNA, is present. As used herein, methods of detecting or determining include detection or determination of an analyte level that is below the level of detection for the method used.

VII. Methods of Preventing and Treating HMGB1-associated Disorders with an HMGB1 iRNA

[0612] The present invention also provides methods of using an iRNA of the invention or a composition containing an iRNA of the invention to inhibit expression of HMGB1, thereby preventing or treating an HMGB1-associated disorder, e.g., metabolic disorder or NAFLD, e.g., NASH.

[0613] In the methods of the invention the cell may be contacted with the siRNA in vitro or in vivo, i.e., the cell may be within a subject.

[0614] A cell suitable for treatment using the methods of the invention may be any cell that expresses an HMGB1 gene, e.g., adrenal, appendix, bne marrow, brain, colon, endometrium, esophagus, fat, gall bladder, heart, kidney, lung, lymph node, ovary, prostate, skin, small intestine, stomach, testis, thyroid, and urinary bladder. In preferred embodiments, a suitable cell is a liver cell. A cell suitable for use in the methods of the invention may be a mammalian cell, e.g., a primate cell (such as a human cell, including human cell in a chimeric non-human animal, or a non-human primate cell, e.g., a monkey cell or a chimpanzee cell), or a non-primate cell. In certain embodiments, the cell is a human cell, e.g., a human liver cell. In the methods of the invention, HMGB1 expression is inhibited in the cell by at least 30, 35, 40, 45, 50, 55, 60, 65, 70, 75, 80, 85, 90, or 95, or to a level below the level of detection of the assay. In preferred embodiments, HMGB1 expression is inhibited by at least 50%. In certain embodiments, expression is determined in a liver cell. In certain embodiments, expression is determined by detecting vesicle associated RNA in a body fluid, e.g., blood or urine.

[0615] The in vivo methods of the invention may include administering to a subject a composition containing an iRNA, where the iRNA includes a nucleotide sequence that is complementary to at least a part of an RNA transcript of the HMGB1 gene of the mammal to which the RNAi agent is to be administered. The composition can be administered by any means known in the art including, but not limited to oral, intraperitoneal, or parenteral routes, including intracranial (e.g., intraventricular, intraparenchymal, and intrathecal), intravenous, intramuscular, subcutaneous, transdermal, airway (aerosol), nasal, rectal, and topical (including buccal and sublingual) administration. In certain embodiments, the compositions are administered by intravenous infusion or injection. In certain embodiments, the compositions are administered by subcutaneous injection. In certain embodiments, the compositions are administered by intramuscular injection. In certain embodiments, the compositions are administered by inhalation.

[0616] In some embodiments, the administration is via a depot injection. A depot injection may release the iRNA in a consistent way over a prolonged time period. Thus, a depot injection may reduce the frequency of dosing needed to obtain a desired effect, e.g., a desired inhibition of HMGB1 or prophylactic or treatment effect. A depot injection may also provide more consistent serum concentrations. Depot injections may include subcutaneous injections or intramuscular injections. In preferred embodiments, the depot injection is a subcutaneous injection.

[0617] In some embodiments, the administration is via a pump. The pump may be an external pump or a surgically implanted pump. In certain embodiments, the pump is a subcutaneously implanted osmotic pump. In other embodiments, the pump is an infusion pump. An infusion pump may be used for intravenous, subcutaneous, arterial, or epidural infusions. In preferred embodiments, the infusion pump is a subcutaneous infusion pump. In other embodiments, the pump is a surgically implanted pump that delivers the iRNA to the liver.

[0618] The mode of administration may be chosen based upon whether local or systemic treatment is desired and based upon the area to which the iRNA agent is to be administered. The route and site of administration may be chosen to enhance targeting.

[0619] In one aspect, the present invention also provides methods for inhibiting the expression of an HMGB1 gene in a mammal. The methods include administering to the mammal a composition comprising a dsRNA that targets an HMGB1 gene in a cell of the mammal and maintaining the mammal for a time sufficient to obtain degradation of the mRNA transcript of the HMGB1 gene, thereby inhibiting expression of the HMGB1 gene in the cell. Reduction in gene expression can be assessed by any methods known in the art and by methods, e.g. qRT-PCR, described herein, e.g., in Example 2. Reduction in protein production can be assessed by any methods known it the art, e.g. ELISA, and by methods described herein. In one embodiment, a puncture liver biopsy sample serves as the tissue material for monitoring the reduction in the HMGB1 gene or protein expression. In other embodiments, a blood sample serves as the subject sample for monitoring the reduction in the HMGB1 protein expression.

[0620] The present invention further provides methods of treatment in a subject in need thereof, e.g., a subject diagnosed with metabolic disorder or NAFLD, e.g., NASH.

[0621] The present invention further provides methods of prophylaxis in a subject in need thereof. The treatment methods of the invention include administering an iRNA of the invention to a subject, e.g., a subject that would benefit from a reduction of HMGB1 expression, in a prophylactically effective amount of an iRNA targeting an HMGB1 gene or a pharmaceutical composition comprising an iRNA targeting an HMGB1 gene.

[0622] An iRNA of the invention may be administered as a “free iRNA.” A free iRNA is administered in the absence of a pharmaceutical composition. The naked iRNA may be in a suitable buffer solution. The buffer solution may comprise acetate, citrate, prolamine, carbonate, or phosphate, or any combination thereof. In one embodiment, the buffer solution is phosphate buffered saline (PBS). The pH and osmolarity of the buffer solution containing the iRNA can be adjusted such that it is suitable for administering to a subject.

[0623] Alternatively, an iRNA of the invention may be administered as a pharmaceutical composition, such as a dsRNA liposomal formulation.

[0624] Subjects that would benefit from an inhibition of an HMGB1 gene expression are subjects at risk of developing or diagnosed with metabolic disorder or a NAFLD, e.g., NASH, or other condition associated with NAFL, e.g., obesity, type 2 diabetes mellitus, dyslipidemia, polycystic ovarian disease, hypothyroidism, obstructive sleep apnea, hypopituitarism, hypogonadism, pancreatoduodenal resection, and psoriasis.

[0625] In an embodiment, the method includes administering a composition featured herein such that expression of the target HMGB1 gene is decreased, such as for about 1, 2, 3, 4, 5, 6, 1-6, 1-3, or 3-6 months per dose.

[0626] Preferably, the iRNAs useful for the methods and compositions featured herein specifically target RNAs (primary or processed) of the target HMGB1 gene. Compositions and methods for inhibiting the expression of these genes using iRNAs can be prepared and performed as described herein.

[0627] Administration of the iRNA according to the methods of the invention may result prevention or treatment of metabolic disorder or a NAFLD, e.g., NASH. Diagnostic criteria for metabolic disorder and various NAFLDs, e.g., NASH are provided below.

[0628] Subjects can be administered a therapeutic amount of iRNA, such as about 0.01 mg/kg to about 200 mg/kg.

[0629] The iRNA can be administered by intravenous infusion over a period of time, on a regular basis. In certain embodiments, after an initial treatment regimen, the treatments can be administered on a less frequent basis. Administration of the iRNA can reduce HMGB1 levels, e.g., in a cell, tissue, blood, or other compartment of the patient by at least 30%, 35%, 40%, 45%, 50%, 55%, 60%, 65%, 70%, 75%, 80%, 85%, 90%, or 95%, or below the level of detection of the assay method used. Preferably administration of the iRNA can reduce HMGB1 levels, e.g., in a cell, tissue, blood, or other compartment of the patient by at least 50%.

[0630] Alternatively, the iRNA can be administered subcutaneously, i.e., by subcutaneous injection. One or more injections may be used to deliver the desired dose of iRNA to a subject. The injections may be repeated over a period of time.

[0631] The administration may be repeated on a regular basis. In certain embodiments, after an initial treatment regimen, the treatments can be administered on a less frequent basis. A repeat-dose regimen may include administration of a therapeutic amount of iRNA on a regular basis, such as once per month to once a year. In certain embodiments, the iRNA is administered about once per month to about once every three months, or about once every three months to about once every six months.

### VIII. Characteristics and Diagnostic Criteria for a Metabolic Disorder and NAFLD

### A. Metabolic Syndrome and Related Conditions

[0632] Metabolic syndrome (Syndrome X) is a name for a group of risk factors that occur together and increase the risk for coronary artery disease, stroke, and type 2 diabetes. The diagnostic criteria for metabolic syndrome are defined by the American Heart Association and the National Heart, Lung, and Blood Institute, as individuals having three or more of the following signs:
[0633] 1. Blood pressure equal to or higher than 130/85 mmHg;
[0634] 2. Fasting blood sugar (glucose) equal to or higher than 100 mg/dL;
[0635] 3. Large waist circumference (length around the waist): Men--40 inches or more, Women--35 inches or more;
[0636] 4. Low HDL cholesterol: Men--under 40 mg/dL, Women--under 50 mg/dL; and
[0637] 5. Triglycerides equal to or higher than 150 mg/dL

[0638] The two most important risk factors for metabolic syndrome are extra weight around the middle and upper parts of the body (central obesity) and insulin resistance, in which the body cannot use insulin effectively. In individuals who do not produce enough insulin or respond to the level of insulin that is produced, blood sugar and fat levels rise. Other risk factors for metabolic syndrome include aging, genetic factors, hormone changes, and a sedentary lifestyle. Individuals with metabolic syndrome frequently suffer from one or both of excessive blood clotting and low levels of systemic inflammation, both of which can exacerbate the condition. In addition to having an increased long-term risk for developing cardiovascular disease and type 2 diabetes, complications of metabolic syndrome further include atherosclerosis, heart attack, kidney disease, non-alcoholic fatty liver disease, peripheral artery disease, and stroke, as well as complications typically associated with diabetes.

[0639] Although metabolic syndrome is formally defined by the five criteria above, metabolic imbalances can be defined by other measures. For example, insulin resistance or pre-diabetes can be indicated by elevated fasting blood glucose of at least 100 mg/dL, 2 hour postprandial blood glucose or serum glucose concentration of at least 140 mg/dl. Diagnostic criteria for type 2 diabetes mellitus are any one of hemoglobin Alc (HbAlc) level of 6.5% or higher; fasting blood glucose of at least 126 mg/dL; 2 hour postprandial blood glucose or serum glucose concentration of at least 200 mg/dl; or random plasma glucose of at least 200 mg/dL in a patient with classic symptoms of hyperglycemia (i.e., polyuria, polydipsia, polyphagia, weight loss) or hyperglycemic crisis.

[0640] Obesity (excessive body mass index [BMI] and visceral obesity) is the most common and well-documented risk factor for NAFLD. In fact, the entire spectrum of obesity, ranging from overweight (BMI 25.0 to <30) to obese (BMI>30) and severely obese (Class 1: BMI 30 to <35; Class 2:35 to <40; Class 3: >40).

[0641] Hypertension, high blood pressure, can be defined by severity with stage 1 hypertension is a systolic pressure ranging from 140 to 159 mm Hg or a diastolic pressure ranging from 90 to 99 mm Hg. More severe hypertension, stage 2 hypertension is a systolic pressure of 160 mm Hg or higher or a diastolic pressure of 100 mm Hg or higher.

[0642] Similarly, hypercholesterolemia is considered to have various severities based on levels. For LDL-cholesterol, 130 to 159 mg/dL is considered borderline high; 160 to 189 mg/dL is considered high; and more than 190 mg/dL is considered very high. For total cholesterol, 200 to 239 mg/dL is considered borderline high and more than 240 mg/dl is considered high. For HDL-cholesterol, less than 40 mg/dl is considered too low.

[0643] Treatment of metabolic syndrome and related disorders includes lifestyle changes or medicines to help reduce blood pressure, LDL cholesterol, and blood sugar, e.g., lose weight, increase exercise. Blood pressure and cholesterol may also be regulated using appropriate drugs.

[0644] B. NAFLD

[0645] NAFLD is formally defined by (1) evidence of hepatic steatosis (HS), either by imaging or histology, and (2) lack of secondary causes of hepatic fat accumulation such as significant alcohol consumption, longterm use of a steatogenic medication, or monogenic hereditary disorders (Chalasani et al., 2017. Hepatology. DOI: 10.1002/hep.29367, incorporated herein by reference). NAFLD is understood to encompass the entire spectrum of fatty liver disease in individuals without significant alcohol consumption, including, e.g., fatty liver, steatohepatitis, and cirrhosis.

[0646] NAFL is considered to include the presence of at least 5% HS without evidence of hepatocellular injury in the form of ballooning of the hepatocytes or evidence of fibrosis.

[0647] Typically, the risk of progression to cirrhosis and liver failure is considered minimal.

[0648] NASH is considered to include the presence of at least 5% HS with inflammation and hepatocyte injury (ballooning) with or without fibrosis. NASH can progress to cirrhosis, liver failure, and sometimes liver cancer.

[0649] Both unweighted and semiquantitiative scoring methods for grading NAFLD are known. The NAFLD activity score (NAS), developed by the NASH Clinical Research Network, is an unweighted composite of steatosis, lobular inflammation, and ballooning scores. In theory, NAS is a useful tool to measure changes in liver histology in patients with NAFLD in clinical trials, but the cost and risks to study subjects of serial liver biopsy make the scoring system less practical for monitoring. Fibrosis is scored separately (Kleiner et al., 2005. Hepatology. 41:1313-1321, also see tpis.upmc.com/changebody.cfm?url=/tpis/schema/NAFLD2006.jsp, both of which are incorporated by reference).

[0650] Steatosis Activity Fibrosis (SAF), developed by the European Fatty Liver Inhibition of Progression Consortium is a semiquantitative score consisting of steatosis amount, activity (lobular inflammation plus ballooning), and fibrosis (Bedossa, 2014. Hepatology, 60:565-575, incorporated herein by reference). There is growing evidence that patients with histological NASH, especially those with some degree of fibrosis, are at higher risk for adverse outcomes such as cirrhosis and liver-related mortality, such that the inclusion of fibrosis in the assessment may be useful. Types of fibrosis most closely associated with long-term mortality are zone 3 sinusoidal fibrosis plus periportal fibrosis (stage 2) to advanced bridging fibrosis (stage 3) or cirrhosis (stage 4). However, as with NAS, the need to perform a liver biopsy makes the scoring method more useful for confirming diagnosis rather than monitoring.

[0651] In the majority of patients, NAFLD is associated with metabolic comorbidities such as obesity, diabetes mellitus, and dyslipidemia. NAFLD can also be associated with, polycystic ovarian disease, hypothyroidism, obstructive sleep apnea, hypopituitarism, hypogonadism, pancreatoduodenal resection, and psoriasis. Although definitive diagnosis of NAFLD requires histological confirmation, as there are no specific treatments of NAFLD and obtaining a liver biopsy is costly, presents a risk to the patient, and can be subject to sampling “error” due to potential heterogeneity in histology throughout the liver. Therefore, liver biopsy should only be performed in those who will likely benefit from the screening, by including or excluding NAFLD as a diagnosis and providing information on the severity of disease. Routine screening of the general patient population by liver biopsy is not advised.

[0652] The presence of metabolic syndrome is a strong predictor for the presence of SH in patients with NAFLD. Although NAFLD is highly associated with components of metabolic syndrome, the presence of increasing number of metabolic diseases, such as insulin resistance, type 2 diabetes, hypertension dyslipidemia, and visceral obesity, seems to increase the risk of progressive liver disease. Therefore, patients with NAFLD and multiple risk factors such as type 2 diabetes mellitus and hypertension are at the highest risk for adverse outcomes.

[0653] Non-invasive methods to assess SH and fibrosis are known, but such methods have their limitations. Serum aminotransferase levels and imaging tests, such as ultrasound, including transient elastography (TE); computed tomography (CT); and magnetic resonance imaging (MRI), do not reliably reflect the spectrum of liver histology in patients with NAFLD. Despite such limitations, MRI, either by spectroscopy or by proton density fat fraction, is an excellent noninvasive modality for quantifying HS and is being widely used in NAFLD clinical trials. The use of TE to obtain continuous attenuation parameters is a promising tool for quantifying hepatic fat in an ambulatory setting. However, the utility of noninvasively quantifying HS in patients with NAFLD in routine clinical care is limited.

[0654] There has been significant interest in developing clinical prediction rules and noninvasive biomarkers for identifying SH in patients with NAFLD. Circulating levels of cytokeratin-18 fragments have been investigated extensively as novel biomarkers for the presence of SH in patients with NAFLD. This test is currently not available in a clinical care setting. Commonly investigated noninvasive tools for the presence of advanced fibrosis in NAFLD include aspartate aminotransferase (AST) to platelet ratio index (APRI), and serum biomarkers (Enhanced Liver Fibrosis [ELF] panel). However, to date, no fully satisfactory assay methods or biomarkers have been identified (Musso et al., 2011. Ann. Med. 43:617-649).

### C. Cirrhosis

[0655] Cirrhosis is defined histologically as a diffuse hepatic process characterized by fibrosis and conversion of the normal liver architecture into structurally abnormal nodules. The progression of liver injury to cirrhosis may occur over weeks to years. Cirrhosis may arise due to any of a number of insults including autoimmune hepatitis, viral hepatitis (e.g., hepatitis B or C), hemochromatosis, primary biliary cirrhosis, or chronic or excessive consumption of alcohol or other drugs that may cause liver damage.

[0656] Cirrhosis may be asymptomatic or may be accompanied by multiple symptoms and result in end stage liver disease. Common signs and symptoms may stem from decreased hepatic synthetic function (eg, coagulopathy), portal hypertension (eg, variceal bleeding), or decreased detoxification capabilities of the liver (eg, hepatic encephalopathy). Patients with cirrhosis experience fatigue, anorexia, weight loss, and muscle wasting. Cutaneous manifestations of cirrhosis include jaundice, spider angiomata, skin telangiectasias (“paper money skin”), palmar erythema, white nails, disappearance of lunulae, and finger clubbing, especially in the setting of hepatopulmonary syndrome. Liver fibrosis can be monitored by the methods discussed above for monitoring NAFLD.

[0657] The treatment of cirrhosis depends on the underlying etiology of the disease.

[0658] This invention is further illustrated by the following examples which should not be construed as limiting. The entire contents of all references, patents and published patent applications cited throughout this application, as well as the Sequence Listing, are hereby incorporated herein by reference.

### EXAMPLES

### Example 1. iRNA Synthesis

Source of reagents

[0659] Where the source of a reagent is not specifically given herein, such reagent can be obtained from any supplier of reagents for molecular biology at a quality/purity standard for application in molecular biology.

siRNA Design

[0660] A set of siRNAs targeting the human high mobility group box 1 gene (HMGB1; human NCBI refseqID NM_002128.5; NCBI GeneID: 3146) as well the toxicology-species HMGB1 ortholog from cynomolgus monkey: NM_001283356) was designed using custom R and Python scripts. All the siRNA designs have a perfect match to the human HMGB1 transcript and a subset either perfect or near-perfect matches to the cynomolgus monkey ortholog. The human NM_002128 REFSEQ mRNA, version 5, has a length of 4273 bases.

[0661] A detailed list of the unmodified HMGB1 sense and antisense strand sequences is shown in Table 3. A detailed list of the modified HMGB 1 sense and antisense strand sequences is shown in Tables 5, 6, and 7.

siRNA Synthesis

[0662] siRNAs were synthesized and annealed using routine methods known in the art.

### Example 2-In Vitro Screening Methods

Cell culture and transfections:

[0663] Hep3b cells (ATCC) were transfected by adding 4.9 μl of Opti-MEM plus 0.1 μl of Lipofectamine RNAiMax per well (Invitrogen, Carlsbad CA. cat #13778-150) to 5 μl of siRNA duplexes per well, with 4 replicates of each SiRNA duplex, into a 384-well plate, and incubated at room temperature for 15 minutes. Forty μl of Eagle's Minimal Essential Medium (Life Tech) containing ˜5×10³ cells were then added to the siRNA mixture. Cells were incubated for 24 hours prior to RNA purification. Single dose experiments were performed at 10 nM.

Total RNA isolation using DYNABEADS mRNA Isolation Kit:

[0664] RNA was isolated using an automated protocol on a BioTek-EL406 platform using DYNABEADs (Invitrogen, cat #61012). Briefly, 70 μl of Lysis/Binding Buffer and 10 μl of lysis buffer containing 3 μl of magnetic beads were added to the plate with cells. Plates were incubated on an electromagnetic shaker for 10 minutes at room temperature and then magnetic beads were captured and the supernatant was removed. Bead-bound RNA was then washed 2 times with 150 μl Wash Buffer A and once with Wash Buffer B. Beads were then washed with 150 μl Elution Buffer, re-captured and supernatant removed. cDNA synthesis using ABI High capacity cDNA reverse transcription kit (Applied Biosystems, Foster City, CA, Cat #4368813):

[0665] Ten μl of a master mix containing 1 μl 10×Buffer, 0.4 μl 25×dNTPs, 1 μl 10× Random primers, 0.5 μl Reverse Transcriptase, 0.5 μl RNase inhibitor and 6.6 μl of H₂O per reaction was added to RNA isolated above. Plates were sealed, mixed, and incubated on an electromagnetic shaker for 10 minutes at room temperature, followed by 2 h 37° C. Real time PCR:

[0666] Two μl of cDNA were added to a master mix containing 0.5 μl of Human GAPDH TAQMAN™ (TaqMan) Probe (4326317E), and 0.5 μl HMGB1 human probe

[0667] (Hs.PT.58.2259017, IDT) and 5 μl Lightcycler 480 probe master mix (Roche Cat #04887301001) per well in a 384 well plates (Roche cat #04887301001). Real time PCR was done in a LightCycler480 Real Time PCR system (Roche). Each duplex was tested at least two times and data were normalized to cells transfected with a non-targeting control siRNA. To calculate relative fold change, real time data were analyzed using the AACt method and normalized to assays performed with cells transfected with a non-targeting control siRNA.

TABLE 2
Abbreviations of nucleotide monomers used in nucleic acid sequence
representation when modifications are indicated. It will be understood
that these monomers, when present in an oligonucleotide, are mutually
linked by 5′-3′-phosphodiester bonds unless otherwise indicated.

| Abbreviation | Nucleotide(s) |
|---|---|
| A | Adenosine-3′-phosphate |
| Ab | beta-L-adenosine-3′-phosphate |
| Abs | beta-L-adenosine-3′-phosphorothioate |
| Af | 2′-fluoroadenosine-3′-phosphate |
| Afs | 2′-fluoroadenosine-3′-phosphorothioate |
| As | adenosine-3′-phosphorothioate |
| C | cytidine-3′-phosphate |
| Cb | beta-L-cytidine-3′-phosphate |
| Cbs | beta-L-cytidine-3′-phosphorothioate |
| Cf | 2′-fluorocytidine-3′-phosphate |
| Cfs | 2′-fluorocytidine-3′-phosphorothioate |
| Cs | cytidine-3′-phosphorothioate |
| G | guanosine-3′-phosphate |
| Gb | beta-L-guanosine-3′-phosphate |
| Gbs | beta-L-guanosine-3′-phosphorothioate |
| Gf | 2′-fluoroguanosine-3′-phosphate |
| Gfs | 2′-fluoroguanosine-3′-phosphorothioate |
| Gs | guanosine-3′-phosphorothioate |
| T | 5′-methyluridine-3′-phosphate |
| Tf | 2′-fluoro-5-methyluridine-3′-phosphate |
| Tfs | 2′-fluoro-5-methyluridine-3′-phosphorothioate |
| Ts | 5-methyluridine-3′-phosphorothioate |
| U | Uridine-3′-phosphate |
| Uf | 2′-fluorouridine-3′-phosphate |
| Ufs | 2′-fluorouridine-3′-phosphorothioate |
| Us | uridine-3′-phosphorothioate |
| N | any nucleotide, modified or unmodified |
| a | 2′-O-methyladenosine-3′-phosphate |
| as | 2′-O-methyladenosine-3′-phosphorothioate |
| c | 2′-O-methylcytidine-3′-phosphate |
| cs | 2′-O-methylcytidine-3′-phosphorothioate |
| g | 2′-O-methylguanosine-3′-phosphate |
| gs | 2′-O-methylguanosine-3′-phosphorothioate |
| t | 2′-O-methyl-5-methyluridine-3′-phosphate |
| ts | 2′-O-methyl-5-methyluridine-3′-phosphorothioate |
| u | 2′-O-methyluridine-3′-phosphate |
| us | 2′-O-methyluridine-3′-phosphorothioate |
| s | phosphorothioate linkage |
| L96 | N-[tris(GalNAc-alkyl)-amidodecanoyl)]-4- |
| | hydroxyprolinol Hyp-(GalNAc-alkyl)3 |
| Y34 | 2-hydroxymethyl-tetrahydrofurane- |
| | 4-methoxy-3-phosphate (abasic 2′-OMe |
| | furanose) |
| Y44 | inverted abasic DNA (2-hydroxymethyl- |
| | tetrahydrofurane-5-phosphate) |
| (Agn) | Adenosine-glycol nucleic acid (GNA) |
| (Cgn) | Cytidine-glycol nucleic acid (GNA) |
| (Ggn) | Guanosine-glycol nucleic acid (GNA) |
| (Tgn) | Thymidine-glycol nucleic acid (GNA) S-Isomer |
| P | Phosphate |
| VP | Vinyl-phosphate |
| (Aam) | 2′-O-(N-methylacetamide)adenosine-3′-phosphate |
| (Aams) | 2′-O-(N-methylacetamide)adenosine-3′-phosphorothioate |
| (Gam) | 2′-O-(N-methylacetamide)guanosine-3′-phosphate |
| (Gams) | 2′-O-(N-methylacetamide)guanosine-3′-phosphorothioate |
| (Tam) | 2′-O-(N-methylacetamide)thymidine-3′-phosphate |
| (Tams) | 2′-O-(N-methylacetamide)thymidine-3′-phosphorothioate |
| dA | 2′-deoxyadenosine-3′-phosphate |
| dAs | 2′-deoxyadenosine-3′-phosphorothioate |
| dC | 2′-deoxycytidine-3′-phosphate |
| dCs | 2′-deoxycytidine-3′-phosphorothioate |
| dG | 2′-deoxyguanosine-3′-phosphate |
| dGs | 2′-deoxyguanosine-3′-phosphorothioate |
| dT | 2′-deoxythymidine-3′-phosphate |
| dTs | 2′-deoxythymidine-3′-phosphorothioate |
| dU | 2′-deoxyuridine |
| dUs | 2′-deoxyuridine-3′-phosphorothioate |
| (Aeo) | 2′-O-methoxyethyladenosine-3′-phosphate |
| (Aeos) | 2′-O-methoxyethyladenosine-3′-phosphorothioate |
| (Geo) | 2′-O-methoxyethylguanosine-3′-phosphate |
| (Geos) | 2′-O-methoxyethylguanosine-3′-phosphorothioate |
| (Teo) | 2′-O-methoxyethyl-5-methyluridine-3′-phosphate |
| (Teos) | 2′-O-methoxyethyl-5-methyluridine-3′-phosphorothioate |
| (m5Ceo) | 2′-O-methoxyethyl-5-methylcytidine-3′-phosphate |
| (m5Ceos) | 2′-O-methoxyethyl-5-methylcytidine-3′-phosphorothioate |
| (A3m) | 3′-O-methyladenosine-2′-phosphate |
| (A3mx) | 3′-O-methyl-xylofuranosyladenosine-2′-phosphate |
| (G3m) | 3′-O-methylguanosine-2′-phosphate |
| (G3mx) | 3′-O-methyl-xylofuranosylguanosine-2′-phosphate |
| (C3m) | 3′-O-methylcytidine-2′-phosphate |
| (C3mx) | 3′-O-methyl-xylofuranosylcytidine-2′-phosphate |
| (U3m) | 3′-O-methyluridine-2′-phosphate |
| U3mx) | 3′-O-methyl-xylofuranosyluridine-2′-phosphate |
| (m5Cam) | 2′-O-(N-methylacetamide)-5- |
| | methylcytidine-3′-phosphate |
| (m5Cams) | 2′-O-(N-methylacetamide)-5- |
| | methylcytidine-3′-phosphorothioate |
| (Chd) | 2′-O-hexadecyl-cytidine-3′-phosphate |
| (Chds) | 2′-O-hexadecyl-cytidine-3′-phosphorothioate |
| (Uhd) | 2′-O-hexadecyl-uridine-3′-phosphate |
| (Uhds) | 2′-O-hexadecyl-uridine-3′-phosphorothioate |
| (pshe) | Hydroxyethylphosphorothioate |

TABLE 3
Unmodified Sense and Antisense Strand Sequences of HMGB1 dsRNAs

| | Sense | | | | Antisense | | | |
|---|---|---|---|---|---|---|---|---|
| Duplex | Oligo | Sense Strand Sequence | SEQ ID | Position in | Oligo | Antisense Strand Sequence | SEQ ID | Position in |
| Name | Name | 5′ to 3′ | NO | NM_002128.5 | Name | 5′ to 3′ | NO | NM_002128.5 |
| AD-192647 | A-380909 | GUGCAAACUUGUCGGGAGGAA | 17 | 242-262 | A-380910 | UUCCUCCCGACAAGUUUGCACAA | 111 | 240-262 |
| AD-193168 | A-381951 | UUUUUAAACUGUACAGUGUCU | 18 | 944-964 | A-381952 | AGACACUGUACAGUUUAAAAACA | 112 | 942-964 |
| AD-193173 | A-381961 | UUUGUAUAGUUAACACACUAA | 19 | 968-988 | A-381962 | UUAGUGUGUUAACUAUACAAAAA | 113 | 966-988 |
| AD-193174 | A-381963 | UUGUAUAGUUAACACACUACA | 20 | 969-989 | A-381964 | UGUAGUGUGUUAACUAUACAAAA | 114 | 967-989 |
| AD-193175 | A-381965 | UGUAUAGUUAACACACUACCA | 21 | 970-990 | A-381966 | UGGUAGUGUGUUAACUAUACAAA | 115 | 968-990 |
| AD-193176 | A-381967 | GUAUAGUUAACACACUACCGA | 22 | 971-991 | A-381968 | UCGGUAGUGUGUUAACUAUACAA | 116 | 969-991 |
| AD-193177 | A-381969 | UAUAGUUAACACACUACCGAA | 23 | 972-992 | A-381970 | UUCGGUAGUGUGUUAACUAUACA | 117 | 970-992 |
| AD-193178 | A-381971 | AUAGUUAACACACUACCGAAU | 24 | 973-993 | A-381972 | AUUCGGUAGUGUGUUAACUAUAC | 118 | 971-993 |
| AD-193179 | A-381973 | UAGUUAACACACUACCGAAUA | 25 | 974-994 | A-381974 | UAUUCGGUAGUGUGUUAACUAUA | 119 | 972-994 |
| AD-193180 | A-381975 | AGUUAACACACUACCGAAUGU | 26 | 975-995 | A-381976 | ACAUUCGGUAGUGUGUUAACUAU | 120 | 973-995 |
| AD-193181 | A-381977 | GUUAACACACUACCGAAUGUA | 27 | 976-996 | A-381978 | UACAUUCGGUAGUGUGUUAACUA | 121 | 974-996 |
| AD-193182 | A-381979 | UUAACACACUACCGAAUGUGU | 28 | 977-997 | A-381980 | ACACAUUCGGUAGUGUGUUAACU | 122 | 975-997 |
| AD-193311 | A-382236 | UCUCUGAUGCAGCUUAUACGA | 29 | 1158-1178 | A-382237 | UCGUAUAAGCUGCAUCAGAGACA | 123 | 1156-1178 |
| AD-193312 | A-382238 | CUCUGAUGCAGCUUAUACGAA | 30 | 1159-1179 | A-382239 | UUCGUAUAAGCUGCAUCAGAGAC | 124 | 1157-1179 |
| AD-193313 | A-382240 | UCUGAUGCAGCUUAUACGAAA | 31 | 1160-1180 | A-382241 | UUUCGUAUAAGCUGCAUCAGAGA | 125 | 1158-1180 |
| AD-193314 | A-382242 | CUGAUGCAGCUUAUACGAAAU | 32 | 1161-1181 | A-382243 | AUUUCGUAUAAGCUGCAUCAGAG | 126 | 1159-1181 |
| AD-193315 | A-382244 | UGAUGCAGCUUAUACGAAAUA | 33 | 1162-1182 | A-382245 | UAUUUCGUAUAAGCUGCAUCAGA | 127 | 1160-1182 |
| AD-193326 | A-382266 | UACGAAAUAAUUGUUGUUCUA | 34 | 1174-1194 | A-382267 | UAGAACAACAAUUAUUUCGUAUA | 128 | 1172-1194 |
| AD-193400 | A-382413 | UUGUUGUCCUUUUCAUAGGUA | 35 | 1298-1318 | A-382414 | UACCUAUGAAAAGGACAACAAUA | 129 | 1296-1318 |
| AD-193422 | A-382457 | GGGAAGCUAGUCUUUUGCUUU | 36 | 1338-1358 | A-382458 | AAAGCAAAAGACUAGCUUCCCCU | 130 | 1336-1358 |
| AD-193478 | A-382569 | AUCCUUUCAUAUAGUUAGCUA | 37 | 1395-1415 | A-382570 | UAGCUAACUAUAUGAAAGGAUAA | 131 | 1393-1415 |
| AD-193479 | A-382571 | UCCUUUCAUAUAGUUAGCUAA | 38 | 1396-1416 | A-382572 | UUAGCUAACUAUAUGAAAGGAUA | 132 | 1394-1416 |
| AD-193498 | A-382609 | AAAAAGCUUUUGUCUACACAA | 39 | 1418-1438 | A-382610 | UUGUGUAGACAAAAGCUUUUUAU | 133 | 1416-1438 |
| AD-193506 | A-382625 | UUUGUCUACACACCCUGCAUA | 40 | 1426-1446 | A-382626 | UAUGCAGGGUGUGUAGACAAAAG | 134 | 1424-1446 |
| AD-193507 | A-382627 | UUGUCUACACACCCUGCAUAU | 41 | 1427-1447 | A-382628 | AUAUGCAGGGUGUGUAGACAAAA | 135 | 1425-1447 |
| AD-193522 | A-382657 | AAGUUAAGUUGAGAUAGUUUU | 42 | 1461-1481 | A-382658 | AAAACUAUCUCAACUUAACUUUA | 136 | 1459-1481 |
| AD-193524 | A-382661 | GUUAAGUUGAGAUAGUUUUCA | 43 | 1463-1483 | A-382662 | UGAAAACUAUCUCAACUUAACUU | 137 | 1461-1483 |
| AD-193527 | A-382667 | AAGUUGAGAUAGUUUUCAUCA | 44 | 1466-1486 | A-382668 | UGAUGAAAACUAUCUCAACUUAA | 138 | 1464-1486 |
| AD-193533 | A-382679 | AGAUAGUUUUCAUCCAUAACU | 45 | 1472-1492 | A-382680 | AGUUAUGGAUGAAAACUAUCUCA | 139 | 1470-1492 |
| AD-193534 | A-382681 | GAUAGUUUUCAUCCAUAACUA | 46 | 1473-1493 | A-382682 | UAGUUAUGGAUGAAAACUAUCUC | 140 | 1471-1493 |
| AD-193535 | A-382683 | AUAGUUUUCAUCCAUAACUGA | 47 | 1474-1494 | A-382684 | UCAGUUAUGGAUGAAAACUAUCU | 141 | 1472-1494 |
| AD-193562 | A-382737 | AAAAUCUUGAUCAGUUAAGAA | 48 | 1501-1521 | A-382738 | UUCUUAACUGAUCAAGAUUUUGG | 142 | 1499-1521 |
| AD-193577 | A-382767 | UAAGAAAUUUCACAUAGCCCA | 49 | 1516-1536 | A-382768 | UGGGCUAUGUGAAAUUUCUUAAC | 143 | 1514-1536 |
| AD-193585 | A-382783 | UUCACAUAGCCCACUUACAUU | 50 | 1524-1544 | A-382784 | AAUGUAAGUGGGCUAUGUGAAAU | 144 | 1522-1544 |
| AD-193586 | A-382785 | UCACAUAGCCCACUUACAUUU | 51 | 1525-1545 | A-382786 | AAAUGUAAGUGGGCUAUGUGAAA | 145 | 1523-1545 |
| AD-193587 | A-382787 | CACAUAGCCCACUUACAUUUA | 52 | 1526-1546 | A-382788 | UAAAUGUAAGUGGGCUAUGUGAA | 146 | 1524-1546 |
| AD-193589 | A-382791 | CAUAGCCCACUUACAUUUACA | 53 | 1528-1548 | A-382792 | UGUAAAUGUAAGUGGGCUAUGUG | 147 | 1526-1548 |
| AD-193592 | A-382797 | AGCCCACUUACAUUUACAAAC | 54 | 1531-1551 | A-382798 | GUUUGUAAAUGUAAGUGGGCUAU | 148 | 1529-1551 |
| AD-193625 | A-382863 | AAUCUACUCAAAGCAUGGGAU | 55 | 1564-1584 | A-382864 | AUCCCAUGCUUUGAGUAGAUUGA | 149 | 1562-1584 |
| AD-193629 | A-382871 | UACUCAAAGCAUGGGAUUAUU | 56 | 1568-1588 | A-382872 | AAUAAUCCCAUGCUUUGAGUAGA | 150 | 1566-1588 |
| AD-193630 | A-382873 | ACUCAAAGCAUGGGAUUAUUA | 57 | 1569-1589 | A-382874 | UAAUAAUCCCAUGCUUUGAGUAG | 151 | 1567-1589 |
| AD-193633 | A-382879 | CAAAGCAUGGGAUUAUUAGAA | 58 | 1572-1592 | A-382880 | UUCUAAUAAUCCCAUGCUUUGAG | 152 | 1570-1592 |
| AD-193635 | A-382883 | AAGCAUGGGAUUAUUAGAAUA | 59 | 1574-1594 | A-382884 | UAUUCUAAUAAUCCCAUGCUUUG | 153 | 1572-1594 |
| AD-193640 | A-382893 | UGGGAUUAUUAGAAUCAAACA | 60 | 1579-1599 | A-382894 | UGUUUGAUUCUAAUAAUCCCAUG | 154 | 1577-1599 |
| AD-193662 | A-382937 | AAAGUCUGUCCUUGAAGGACU | 61 | 1605-1625 | A-382938 | AGUCCUUCAAGGACAGACUUUCA | 155 | 1603-1625 |
| AD-193666 | A-382945 | UCUGUCCUUGAAGGACUAAUA | 62 | 1609-1629 | A-382946 | UAUUAGUCCUUCAAGGACAGACU | 156 | 1607-1629 |
| AD-193667 | A-382947 | CUGUCCUUGAAGGACUAAUAA | 63 | 1610-1630 | A-382948 | UUAUUAGUCCUUCAAGGACAGAC | 157 | 1608-1630 |
| AD-193669 | A-382951 | GUCCUUGAAGGACUAAUAGAA | 64 | 1612-1632 | A-382952 | UUCUAUUAGUCCUUCAAGGACAG | 158 | 1610-1632 |
| AD-193690 | A-382993 | AAGUAUGUUCUAACCUUUACA | 65 | 1633-1653 | A-382994 | UGUAAAGGUUAGAACAUACUUUU | 159 | 1631-1653 |
| AD-193697 | A-383007 | UUCUAACCUUUACAUGAGGAA | 66 | 1640-1660 | A-383008 | UUCCUCAUGUAAAGGUUAGAACA | 160 | 1638-1660 |
| AD-193702 | A-383017 | ACCUUUACAUGAGGACUCUAU | 67 | 1645-1665 | A-383018 | AUAGAGUCCUCAUGUAAAGGUUA | 161 | 1643-1665 |
| AD-193705 | A-383023 | UUUACAUGAGGACUCUAUUCU | 68 | 1648-1668 | A-383024 | AGAAUAGAGUCCUCAUGUAAAGG | 162 | 1646-1668 |
| AD-193706 | A-383025 | UUACAUGAGGACUCUAUUCUU | 69 | 1649-1669 | A-383026 | AAGAAUAGAGUCCUCAUGUAAAG | 163 | 1647-1669 |
| AD-193707 | A-383027 | UACAUGAGGACUCUAUUCUUU | 70 | 1650-1670 | A-383028 | AAAGAAUAGAGUCCUCAUGUAAA | 164 | 1648-1670 |
| AD-193711 | A-383035 | UGAGGACUCUAUUCUUUAACU | 71 | 1654-1674 | A-383036 | AGUUAAAGAAUAGAGUCCUCAUG | 165 | 1652-1674 |
| AD-193713 | A-383039 | AGGACUCUAUUCUUUAACUCA | 72 | 1656-1676 | A-383040 | UGAGUUAAAGAAUAGAGUCCUCA | 166 | 1654-1676 |
| AD-193717 | A-383047 | CUCUAUUCUUUAACUCCCAUU | 73 | 1660-1680 | A-383048 | AAUGGGAGUUAAAGAAUAGAGUC | 167 | 1658-1680 |
| AD-193725 | A-383063 | UUUAACUCCCAUUACCAUGUA | 74 | 1668-1688 | A-383064 | UACAUGGUAAUGGGAGUUAAAGA | 168 | 1666-1688 |
| AD-193726 | A-383065 | UUAACUCCCAUUACCAUGUAA | 75 | 1669-1689 | A-383066 | UUACAUGGUAAUGGGAGUUAAAG | 169 | 1667-1689 |
| AD-193727 | A-383067 | UAACUCCCAUUACCAUGUAAU | 76 | 1670-1690 | A-383068 | AUUACAUGGUAAUGGGAGUUAAA | 170 | 1668-1690 |
| AD-193729 | A-383071 | ACUCCCAUUACCAUGUAAUGA | 77 | 1672-1692 | A-383072 | UCAUUACAUGGUAAUGGGAGUUA | 171 | 1670-1692 |
| AD-193731 | A-383075 | UCCCAUUACCAUGUAAUGGCA | 78 | 1674-1694 | A-383076 | UGCCAUUACAUGGUAAUGGGAGU | 172 | 1672-1694 |
| AD-193737 | A-383087 | UACCAUGUAAUGGCAGUUAUA | 79 | 1680-1700 | A-383088 | UAUAACUGCCAUUACAUGGUAAU | 173 | 1678-1700 |
| AD-193744 | A-383101 | UAAUGGCAGUUAUAUUUUGCA | 80 | 1687-1707 | A-383102 | UGCAAAAUAUAACUGCCAUUACA | 174 | 1685-1707 |
| AD-193782 | A-383177 | AAAGCGUGAGCUUAAAAUACA | 81 | 1745-1765 | A-383178 | UGUAUUUUAAGCUCACGCUUUUG | 175 | 1743-1765 |
| AD-193783 | A-383179 | AAGCGUGAGCUUAAAAUACAA | 82 | 1746-1766 | A-383180 | UUGUAUUUUAAGCUCACGCUUUU | 176 | 1744-1766 |
| AD-193804 | A-383221 | UUUGUUGACAUUAGUCUCAGU | 83 | 1785-1805 | A-383222 | ACUGAGACUAAUGUCAACAAAAA | 177 | 1783-1805 |
| AD-193805 | A-383223 | UUGUUGACAUUAGUCUCAGUA | 84 | 1786-1806 | A-383224 | UACUGAGACUAAUGUCAACAAAA | 178 | 1784-1806 |
| AD-193833 | A-383279 | UGAAAAUGCUGGCUAUAGAUA | 85 | 1814-1834 | A-383280 | UAUCUAUAGCCAGCAUUUUCAUA | 179 | 1812-1834 |
| AD-193841 | A-383295 | CUGGCUAUAGAUGUCUUUUCA | 86 | 1822-1842 | A-383296 | UGAAAAGACAUCUAUAGCCAGCA | 180 | 1820-1842 |
| AD-193870 | A-383353 | UAAAUAUGGACUGCUCAGGAA | 87 | 1851-1871 | A-383354 | UUCCUGAGCAGUCCAUAUUUAGA | 181 | 1849-1871 |
| AD-193875 | A-383363 | AUGGACUGCUCAGGAAACGAA | 88 | 1856-1876 | A-383364 | UUCGUUUCCUGAGCAGUCCAUAU | 182 | 1854-1876 |
| AD-193877 | A-383367 | GGACUGCUCAGGAAACGAGAA | 89 | 1858-1878 | A-383368 | UUCUCGUUUCCUGAGCAGUCCAU | 183 | 1856-1878 |
| AD-193881 | A-383375 | UGCUCAGGAAACGAGACUUUA | 90 | 1862-1882 | A-383376 | UAAAGUCUCGUUUCCUGAGCAGU | 184 | 1860-1882 |
| AD-193887 | A-383387 | GGAAACGAGACUUUCCAUUAA | 91 | 1868-1888 | A-383388 | UUAAUGGAAAGUCUCGUUUCCUG | 185 | 1866-1888 |
| AD-193888 | A-383389 | GAAACGAGACUUUCCAUUACA | 92 | 1869-1889 | A-383390 | UGUAAUGGAAAGUCUCGUUUCCU | 186 | 1867-1889 |
| AD-193905 | A-383423 | UUUAAUUAAUUGGGCCAGCUU | 93 | 1896-1916 | A-383424 | AAGCUGGCCCAAUUAAUUAAAAA | 187 | 1894-1916 |
| AD-193907 | A-383427 | UAAUUAAUUGGGCCAGCUUUU | 94 | 1898-1918 | A-383428 | AAAAGCUGGCCCAAUUAAUUAAA | 188 | 1896-1918 |
| AD-194087 | A-383787 | GGUUUUCGAGAUUAUCGUUUU | 95 | 2131-2151 | A-383788 | AAAACGAUAAUCUCGAAAACCAC | 189 | 2129-2151 |
| AD-194088 | A-383789 | GUUUUCGAGAUUAUCGUUUUA | 96 | 2132-2152 | A-383790 | UAAAACGAUAAUCUCGAAAACCA | 190 | 2130-2152 |
| AD-194089 | A-383791 | UUUUCGAGAUUAUCGUUUUCU | 97 | 2133-2153 | A-383792 | AGAAAACGAUAAUCUCGAAAACC | 191 | 2131-2153 |
| AD-194090 | A-383793 | UUUCGAGAUUAUCGUUUUCUU | 98 | 2134-2154 | A-383794 | AAGAAAACGAUAAUCUCGAAAAC | 192 | 2132-2154 |
| AD-194120 | A-383853 | GUAUUUUAAAAUAGCGUUCUU | 99 | 2164-2184 | A-383854 | AAGAACGCUAUUUUAAAAUACUG | 193 | 2162-2184 |
| AD-194134 | A-383881 | CGUUCUUGUAAUUUUACACGA | 100 | 2178-2198 | A-383882 | UCGUGUAAAAUUACAAGAACGCU | 194 | 2176-2198 |
| AD-194135 | A-383883 | GUUCUUGUAAUUUUACACGCU | 101 | 2179-2199 | A-383884 | AGCGUGUAAAAUUACAAGAACGC | 195 | 2177-2199 |
| AD-194136 | A-383885 | UUCUUGUAAUUUUACACGCUU | 102 | 2180-2200 | A-383886 | AAGCGUGUAAAAUUACAAGAACG | 196 | 2178-2200 |
| AD-194137 | A-383887 | UCUUGUAAUUUUACACGCUUU | 103 | 2181-2201 | A-383888 | AAAGCGUGUAAAAUUACAAGAAC | 197 | 2179-2201 |
| AD-194140 | A-383893 | UGUAAUUUUACACGCUUUUGU | 104 | 2184-2204 | A-383894 | ACAAAAGCGUGUAAAAUUACAAG | 198 | 2182-2204 |
| AD-194163 | A-383939 | UGGAGUGCUGUUUUGUUAUAU | 105 | 2207-2227 | A-383940 | AUAUAACAAAACAGCACUCCAUC | 199 | 2205-2227 |
| AD-194218 | A-384049 | AGGAGGAAUACUGAACAUCUA | 106 | 2274-2294 | A-384050 | UAGAUGUUCAGUAUUCCUCCUGA | 200 | 2272-2294 |
| AD-194234 | A-384081 | AUCUGAGUCCUGGAUGAUACU | 107 | 2290-2310 | A-384082 | AGUAUCAUCCAGGACUCAGAUGU | 201 | 2288-2310 |
| AD-194238 | A-384089 | GAGUCCUGGAUGAUACUAAUA | 108 | 2294-2314 | A-384090 | UAUUAGUAUCAUCCAGGACUCAG | 202 | 2292-2314 |
| AD-194239 | A-384091 | AGUCCUGGAUGAUACUAAUAA | 109 | 2295-2315 | A-384092 | UUAUUAGUAUCAUCCAGGACUCA | 203 | 2293-2315 |
| AD-194240 | A-384093 | GUCCUGGAUGAUACUAAUAAA | 110 | 2296-2316 | A-384094 | UUUAUUAGUAUCAUCCAGGACUC | 204 | 2294-2316 |

TABLE 4
HMGB1 Single 10 nM Dose Screen in Hep3B cells

| | % Message | |
|---|---|---|
| Duplex Name | Remaining | STDEV |
| AD-192647 | 81.57 | 3.56 |
| AD-193168 | 20.43 | 2.54 |
| AD-193173 | 24.09 | 1.23 |
| AD-193174 | 26.53 | 3.25 |
| AD-193175 | 27.90 | 4.30 |
| AD-193176 | 34.01 | 6.20 |
| AD-193177 | 15.73 | 2.06 |
| AD-193178 | 26.24 | 4.01 |
| AD-193179 | 25.73 | 9.39 |
| AD-193180 | 21.18 | 2.01 |
| AD-193181 | 38.63 | 7.53 |
| AD-193182 | 21.56 | 5.17 |
| AD-193311 | 25.70 | 4.33 |
| AD-193312 | 18.47 | 3.13 |
| AD-193313 | 20.82 | 10.27 |
| AD-193314 | 22.41 | 5.21 |
| AD-193315 | 27.80 | 8.56 |
| AD-193326 | 29.11 | 7.73 |
| AD-193400 | 82.08 | 4.18 |
| AD-193422 | 79.51 | 7.23 |
| AD-193478 | 79.52 | 8.18 |
| AD-193479 | 70.42 | 3.83 |
| AD-193498 | 83.25 | 2.42 |
| AD-193506 | 80.09 | 6.36 |
| AD-193507 | 66.94 | 6.17 |
| AD-193522 | 74.92 | 4.81 |
| AD-193524 | 79.70 | 0.98 |
| AD-193527 | 74.59 | 4.47 |
| AD-193533 | 74.98 | 2.84 |
| AD-193534 | 82.24 | 7.32 |
| AD-193535 | 90.81 | 17.72 |
| AD-193562 | 69.12 | 4.29 |
| AD-193577 | 82.35 | 9.79 |
| AD-193585 | 69.16 | 7.65 |
| AD-193586 | 84.34 | 8.42 |
| AD-193587 | 73.06 | 2.96 |
| AD-193589 | 68.30 | 0.31 |
| AD-193592 | 71.65 | 9.71 |
| AD-193625 | 85.01 | 3.19 |
| AD-193629 | 75.42 | 6.58 |
| AD-193630 | 70.89 | 3.30 |
| AD-193633 | 76.98 | 1.12 |
| AD-193635 | 73.79 | 8.93 |
| AD-193640 | 83.67 | 10.30 |
| AD-193662 | 79.32 | 2.93 |
| AD-193666 | 69.14 | 3.47 |
| AD-193667 | 71.79 | 4.27 |
| AD-193669 | 74.43 | 6.47 |
| AD-193690 | 82.84 | 3.36 |
| AD-193697 | 95.48 | 14.41 |
| AD-193702 | 99.68 | 11.04 |
| AD-193705 | 65.56 | 5.34 |
| AD-193706 | 92.00 | 13.15 |
| AD-193707 | 62.04 | 4.15 |
| AD-193711 | 62.39 | 4.64 |
| AD-193713 | 65.37 | 3.62 |
| AD-193717 | 85.08 | 8.81 |
| AD-193725 | 120.19 | 10.38 |
| AD-193726 | 114.41 | 11.32 |
| AD-193727 | 87.63 | 6.87 |
| AD-193729 | 94.59 | 11.02 |
| AD-193731 | 97.95 | 9.65 |
| AD-193737 | 84.99 | 8.68 |
| AD-193744 | 78.18 | 5.00 |
| AD-193782 | 69.62 | 5.67 |
| AD-193783 | 81.44 | 7.84 |
| AD-193804 | 54.01 | 2.50 |
| AD-193805 | 78.66 | 9.48 |
| AD-193833 | 81.66 | 5.79 |
| AD-193841 | 87.16 | 16.71 |
| AD-193870 | 85.76 | 3.40 |
| AD-193875 | 86.06 | 16.09 |
| AD-193877 | 79.32 | 3.03 |
| AD-193881 | 100.68 | 12.73 |
| AD-193887 | 84.55 | 12.29 |
| AD-193888 | 76.99 | 10.96 |
| AD-193905 | 74.52 | 2.74 |
| AD-193907 | 86.49 | 6.58 |
| AD-194087 | 86.44 | 13.74 |
| AD-194088 | 74.32 | 13.04 |
| AD-194089 | 86.18 | 21.81 |
| AD-194090 | 92.04 | 16.15 |
| AD-194120 | 84.68 | 18.31 |
| AD-194134 | 63.14 | 9.93 |
| AD-194135 | 80.83 | 2.56 |
| AD-194136 | 75.00 | 9.48 |
| AD-194137 | 74.80 | 8.75 |
| AD-194140 | 79.80 | 8.97 |
| AD-194163 | 71.16 | 5.21 |
| AD-194218 | 80.36 | 8.98 |
| AD-194234 | 70.23 | 0.72 |
| AD-194238 | 65.81 | 15.61 |
| AD-194239 | 75.27 | 10.77 |
| AD-194240 | 67.08 | 6.69 |

TABLE 5
HMGB1 Modified Sequences

| | Sense | | SEQ | Antisense | | | | |
|---|---|---|---|---|---|---|---|---|
| Duplex | Oligo | Sense Strand Sequence | ID | Oligo | Antisense Strand Sequence | SEQ ID | Position in | SEQ ID |
| Name | Name | 5′ to 3′ | NO | Name | 5′ to 3′ | NO | NM_002128.5 | NO |
| AD-193326 | A-382266 | usascgaaAfuAfAfUfuguuguucuaL96 | 205 | A-382267 | usAfsgaaCfaAfCfaauuAfuUfucguasusa | 299 | UAUACGAAAUAAUUGUUGUUCUG | 393 |
| AD-193478 | A-382569 | asusccuuUfcAfUfAfuaguuagcuaL96 | 206 | A-382570 | usAfsgcuAfaCfUfauauGfaAfaggausasa | 300 | UUAUCCUUUCAUAUAGUUAGCUA | 394 |
| AD-193587 | A-382787 | csascauaGfcCfCfAfcuuacauuuaL96 | 207 | A-382788 | usAfsaauGfuAfAfguggGfcUfaugugsasa | 301 | UUCACAUAGCCCACUUACAUUUA | 395 |
| AD-194240 | A-384093 | gsusccugGfaUfGfAfuacuaauaaaL96 | 208 | A-384094 | usUfsuauUfaGfUfaucaUfcCfaggacsusc | 302 | GAGUCCUGGAUGAUACUAAUAAA | 396 |
| AD-193585 | A-382783 | ususcacaUfaGfCfCfcacuuacauuL96 | 209 | A-382784 | asAfsuguAfaGfUfgggcUfaUfgugaasasu | 303 | AUUUCACAUAGCCCACUUACAUU | 397 |
| AD-193589 | A-382791 | csasuagcCfcAfCfUfuacauuuacaL96 | 210 | A-382792 | usGfsuaaAfuGfUfaaguGfgGfcuaugsusg | 304 | CACAUAGCCCACUUACAUUUACA | 398 |
| AD-193707 | A-383027 | usascaugAfgGfAfCfucuauucuuuL96 | 211 | A-383028 | asAfsagaAfuAfGfagucCfuCfauguasasa | 305 | UUUACAUGAGGACUCUAUUCUUU | 399 |
| AD-193711 | A-383035 | usgsaggaCfuCfUfAfuucuuuaacuL96 | 212 | A-383036 | asGfsuuaAfaGfAfauagAfgUfccucasusg | 306 | CAUGAGGACUCUAUUCUUUAACU | 400 |
| AD-193783 | A-383179 | asasgcguGfaGfCfUfuaaaauacaaL96 | 213 | A-383180 | usUfsguaUfuUfUfaagcUfcAfcgcuususu | 307 | AAAAGCGUGAGCUUAAAAUACAA | 401 |
| AD-194087 | A-383787 | gsgsuuuuCfgAfGfAfuuaucguuuuL96 | 214 | A-383788 | asAfsaacGfaUfAfaucuCfgAfaaaccsasc | 308 | GUGGUUUUCGAGAUUAUCGUUUU | 402 |
| AD-194120 | A-383853 | gsusauuuUfaAfAfAfuagcguucuuL96 | 215 | A-383854 | asAfsgaaCfgCfUfauuuUfaAfaauacsusg | 309 | CAGUAUUUUAAAAUAGCGUUCUU | 403 |
| AD-193400 | A-382413 | ususguugUfcCfUfUfuucauagguaL96 | 216 | A-382414 | usAfsccuAfuGfAfaaagGfaCfaacaasusa | 310 | UAUUGUUGUCCUUUUCAUAGGUC | 404 |
| AD-193887 | A-383387 | gsgsaaacGfaGfAfCfuuuccauuaaL96 | 217 | A-383388 | usUfsaauGfgAfAfagucUfcGfuuuccsusg | 311 | CAGGAAACGAGACUUUCCAUUAC | 405 |
| AD-194088 | A-383789 | gsusuuucGfaGfAfUfuaucguuuuaL96 | 218 | A-383790 | usAfsaaaCfgAfUfaaucUfcGfaaaacscsa | 312 | UGGUUUUCGAGAUUAUCGUUUUC | 406 |
| AD-194163 | A-383939 | usgsgaguGfcUfGfUfuuuguuauauL96 | 219 | A-383940 | asUfsauaAfcAfAfaacaGfcAfcuccasusc | 313 | GAUGGAGUGCUGUUUUGUUAUAU | 407 |
| AD-193313 | A-382240 | uscsugauGfcAfGfCfuuauacgaaaL96 | 220 | A-382241 | usUfsucgUfaUfAfagcuGfcAfucagasgsa | 314 | UCUCUGAUGCAGCUUAUACGAAA | 408 |
| AD-193314 | A-382242 | csusgaugCfaGfCfUfuauacgaaauL96 | 221 | A-382243 | asUfsuucGfuAfUfaagcUfgCfaucagsasg | 315 | CUCUGAUGCAGCUUAUACGAAAU | 409 |
| AD-193534 | A-382681 | gsasuaguUfuUfCfAfuccauaacuaL96 | 222 | A-382682 | usAfsguuAfuGfGfaugaAfaAfcuaucsusc | 316 | GAGAUAGUUUUCAUCCAUAACUG | 410 |
| AD-193586 | A-382785 | uscsacauAfgCfCfCfacuuacauuuL96 | 223 | A-382786 | asAfsaugUfaAfGfugggCfuAfugugasasa | 317 | UUUCACAUAGCCCACUUACAUUU | 411 |
| AD-193706 | A-383025 | ususacauGfaGfGfAfcucuauucuuL96 | 224 | A-383026 | asAfsgaaUfaGfAfguccUfcAfuguaasasg | 318 | CUUUACAUGAGGACUCUAUUCUU | 412 |
| AD-193841 | A-383295 | csusggcuAfuAfGfAfugucuuuucaL96 | 225 | A-383296 | usGfsaaaAfgAfCfaucuAfuAfgccagscsa | 319 | UGCUGGCUAUAGAUGUCUUUUCC | 413 |
| AD-194090 | A-383793 | ususucgaGfaUfUfAfucguuuucuuL96 | 226 | A-383794 | asAfsgaaAfaCfGfauaaUfcUfcgaaasasc | 320 | GUUUUCGAGAUUAUCGUUUUCUU | 414 |
| AD-194136 | A-383885 | ususcuugUfaAfUfUfuuacacgcuuL96 | 227 | A-383886 | asAfsgcgUfgUfAfaaauUfaCfaagaascsg | 321 | CGUUCUUGUAAUUUUACACGCUU | 415 |
| AD-193180 | A-381975 | asgsuuaaCfaCfAfCfuaccgaauguL96 | 228 | A-381976 | asCfsauuCfgGfUfagugUfgUfuaacusasu | 322 | AUAGUUAACACACUACCGAAUGU | 416 |
| AD-193522 | A-382657 | asasguuaAfgUfUfGfagauaguuuuL96 | 229 | A-382658 | asAfsaacUfaUfCfucaaCfuUfaacuususa | 323 | UAAAGUUAAGUUGAGAUAGUUUU | 417 |
| AD-193635 | A-382883 | asasgcauGfgGfAfUfuauuagaauaL96 | 230 | A-382884 | usAfsuucUfaAfUfaaucCfcAfugcuususg | 324 | CAAAGCAUGGGAUUAUUAGAAUC | 418 |
| AD-193717 | A-383047 | csuscuauUfcUfUfUfaacucccauuL96 | 231 | A-383048 | asAfsuggGfaGfUfuaaaGfaAfuagagsusc | 325 | GACUCUAUUCUUUAACUCCCAUU | 419 |
| AD-194137 | A-383887 | uscsuuguAfaUfUfUfuacacgcuuuL96 | 232 | A-383888 | asAfsagcGfuGfUfaaaaUfuAfcaagasasc | 326 | GUUCUUGUAAUUUUACACGCUUU | 420 |
| AD-193179 | A-381973 | usasguuaAfcAfCfAfcuaccgaauaL96 | 233 | A-381974 | usAfsuucGfgUfAfguguGfuUfaacuasusa | 327 | UAUAGUUAACACACUACCGAAUG | 421 |
| AD-193181 | A-381977 | gsusuaacAfcAfCfUfaccgaauguaL96 | 234 | A-381978 | usAfscauUfcGfGfuaguGfuGfuuaacsusa | 328 | UAGUUAACACACUACCGAAUGUG | 422 |
| AD-193312 | A-382238 | csuscugaUfgCfAfGfcuuauacgaaL96 | 235 | A-382239 | usUfscguAfuAfAfgcugCfaUfcagagsasc | 329 | GUCUCUGAUGCAGCUUAUACGAA | 423 |
| AD-193506 | A-382625 | ususugucUfaCfAfCfacccugcauaL96 | 236 | A-382626 | usAfsugcAfgGfGfugugUfaGfacaaasasg | 330 | CUUUUGUCUACACACCCUGCAUA | 424 |
| AD-193533 | A-382679 | asgsauagUfuUfUfCfauccauaacuL96 | 237 | A-382680 | asGfsuuaUfgGfAfugaaAfaCfua ucuscsa | 331 | UGAGAUAGUUUUCAUCCAUAACU | 425 |
| AD-193629 | A-382871 | usascucaAfaGfCfAfugggauuauuL96 | 238 | A-382872 | asAfsuaaUfcCfCfaugcUfuUfgaguasgsa | 332 | UCUACUCAAAGCAUGGGAUUAUU | 426 |
| AD-193726 | A-383065 | ususaacuCfcCfAfUfuaccauguaaL96 | 239 | A-383066 | usUfsacaUfgGfUfaaugGfgAfguuaasasg | 333 | CUUUAACUCCCAUUACCAUGUAA | 427 |
| AD-193727 | A-383067 | usasacucCfcAfUfUfaccauguaauL96 | 240 | A-383068 | asUfsuacAfuGfGfuaauGfgGfaguuasasa | 334 | UUUAACUCCCAUUACCAUGUAAU | 428 |
| AD-193782 | A-383177 | asasagcgUfgAfGfCfuuaaaauacaL96 | 241 | A-383178 | usGfsuauUfuUfAfagcuCfaCfgcuuususg | 335 | CAAAAGCGUGAGCUUAAAAUACA | 429 |
| AD-193805 | A-383223 | ususguugAfcAfUfUfagucucaguaL96 | 242 | A-383224 | usAfscugAfgAfCfuaauGfuCfaacaasasa | 336 | UUUUGUUGACAUUAGUCUCAGUG | 430 |
| AD-193507 | A-382627 | ususgucuAfcAfCfAfcccugcauauL96 | 243 | A-382628 | asUfsaugCfaGfGfguguGfuAfgacaasasa | 337 | UUUUGUCUACACACCCUGCAUAU | 431 |
| AD-193592 | A-382797 | asgscccaCfuUfAfCfauuuacaaacL96 | 244 | A-382798 | gsUfsuugUfaAfAfuguaAfgUfgggcusasu | 338 | AUAGCCCACUUACAUUUACAAAC | 432 |
| AD-193697 | A-383007 | ususcuaaCfcUfUfUfacaugaggaaL96 | 245 | A-383008 | usUfsccuCfaUfGfuaaaGfgUfuagaascsa | 339 | UGUUCUAACCUUUACAUGAGGAC | 433 |
| AD-193702 | A-383017 | ascscuuuAfcAfUfGfaggacucuauL96 | 246 | A-383018 | asUfsagaGfuCfCfucauGfuAfaaggususa | 340 | UAACCUUUACAUGAGGACUCUAU | 434 |
| AD-193725 | A-383063 | ususuaacUfcCfCfAfuuaccauguaL96 | 247 | A-383064 | usAfscauGfgUfAfauggGfaGfuuaaasgsa | 341 | UCUUUAACUCCCAUUACCAUGUA | 435 |
| AD-193881 | A-383375 | usgscucaGfgAfAfAfcgagacuuuaL96 | 248 | A-383376 | usAfsaagUfcUfCfguuuCfcUfgagcasgsu | 342 | ACUGCUCAGGAAACGAGACUUUC | 436 |
| AD-193178 | A-381971 | asusaguuAfaCfAfCfacuaccgaauL96 | 249 | A-381972 | asUfsucgGfuAfGfugugUfuAfacuausasc | 343 | GUAUAGUUAACACACUACCGAAU | 437 |
| AD-193315 | A-382244 | usgsaugcAfgCfUfUfauacgaaauaL96 | 250 | A-382245 | usAfsuuuCfgUfAfuaagCfuGfcaucasgsa | 344 | UCUGAUGCAGCUUAUACGAAAUA | 438 |
| AD-193666 | A-382945 | uscsugucCfuUfGfAfaggacuaauaL96 | 251 | A-382946 | usAfsuuaGfuCfCfuucaAfgGfacagascsu | 345 | AGUCUGUCCUUGAAGGACUAAUA | 439 |
| AD-193888 | A-383389 | gsasaacgAfgAfCfUfuuccauuacaL96 | 252 | A-383390 | usGfsuaaUfgGfAfaaguCfuCfguuucscsu | 346 | AGGAAACGAGACUUUCCAUUACA | 440 |
| AD-194135 | A-383883 | gsusucuuGfuAfAfUfuuuacacgcuL96 | 253 | A-383884 | asGfscguGfuAfAfaauuAfcAfagaacsgsc | 347 | GCGUUCUUGUAAUUUUACACGCU | 441 |
| AD-193479 | A-382571 | uscscuuuCfaUfAfUfaguuagcuaaL96 | 254 | A-382572 | usUfsagcUfaAfCfuauaUfgAfaaggasusa | 348 | UAUCCUUUCAUAUAGUUAGCUAA | 442 |
| AD-193662 | A-382937 | asasagucUfgUfCfCfuugaaggacuL96 | 255 | A-382938 | asGfsuccUfuCfAfaggaCfaGfacuuuscsa | 349 | UGAAAGUCUGUCCUUGAAGGACU | 443 |
| AD-193669 | A-382951 | gsusccuuGfaAfGfGfacuaauagaaL96 | 256 | A-382952 | usUfscuaUfuAfGfuccuUfcAfaggacsasg | 350 | CUGUCCUUGAAGGACUAAUAGAA | 444 |
| AD-194134 | A-383881 | csgsuucuUfgUfAfAfuuuuacacgaL96 | 257 | A-383882 | usCfsgugUfaAfAfauuaCfaAfgaacgscsu | 351 | AGCGUUCUUGUAAUUUUACACGC | 445 |
| AD-193175 | A-381965 | usgsuauaGfuUfAfAfcacacuaccaL96 | 258 | A-381966 | usGfsguaGfuGfUfguuaAfcUfauacasasa | 352 | UUUGUAUAGUUAACACACUACCG | 446 |
| AD-193713 | A-383039 | asgsgacuCfuAfUfUfcuuuaacucaL96 | 259 | A-383040 | usGfsaguUfaAfAfgaauAfgAfguccuscsa | 353 | UGAGGACUCUAUUCUUUAACUCC | 447 |
| AD-194140 | A-383893 | usgsuaauUfuUfAfCfacgcuuuuguL96 | 260 | A-383894 | asCfsaaaAfgCfGfuguaAfaAfuuacasasg | 354 | CUUGUAAUUUUACACGCUUUUGU | 448 |
| AD-194239 | A-384091 | asgsuccuGfgAfUfGfauacuaauaaL96 | 261 | A-384092 | usUfsauuAfgUfAfucauCfcAfggacuscsa | 355 | UGAGUCCUGGAUGAUACUAAUAA | 449 |
| AD-193177 | A-381969 | usasuaguUfaAfCfAfcacuaccgaaL96 | 262 | A-381970 | usUfscggUfaGfUfguguUfaAfcuauascsa | 356 | UGUAUAGUUAACACACUACCGAA | 450 |
| AD-193562 | A-382737 | asasaaucUfuGfAfUfcaguuaagaaL96 | 263 | A-382738 | usUfscuuAfaCfUfgaucAfaGfauuuusgsg | 357 | CCAAAAUCUUGAUCAGUUAAGAA | 451 |
| AD-193630 | A-382873 | ascsucaaAfgCfAfUfgggauuauuaL96 | 264 | A-382874 | usAfsauaAfuCfCfcaugCfuUfugagusasg | 358 | CUACUCAAAGCAUGGGAUUAUUA | 452 |
| AD-193731 | A-383075 | uscsccauUfaCfCfAfuguaauggcaL96 | 265 | A-383076 | usGfsccaUfuAfCfauggUfaAfugggasgsu | 359 | ACUCCCAUUACCAUGUAAUGGCA | 453 |
| AD-193804 | A-383221 | ususuguuGfaCfAfUfuagucucaguL96 | 266 | A-383222 | asCfsugaGfaCfUfaaugUfcAfacaaasasa | 360 | UUUUUGUUGACAUUAGUCUCAGU | 454 |
| AD-194238 | A-384089 | gsasguccUfgGfAfUfgauacuaauaL96 | 267 | A-384090 | usAfsuuaGfuAfUfcaucCfaGfgacucsasg | 361 | CUGAGUCCUGGAUGAUACUAAUA | 455 |
| AD-193168 | A-381951 | ususuuuaAfaCfUfGfuacagugucuL96 | 268 | A-381952 | asGfsacaCfuGfUfacagUfuUfaaaaascsa | 362 | UGUUUUUAAACUGUACAGUGUCU | 456 |
| AD-193174 | A-381963 | ususguauAfgUfUfAfacacacuacaL96 | 269 | A-381964 | usGfsuagUfgUfGfuuaaCfuAfuacaasasa | 363 | UUUUGUAUAGUUAACACACUACC | 457 |
| AD-193182 | A-381979 | ususaacaCfaCfUfAfccgaauguguL96 | 270 | A-381980 | asCfsacaUfuCfGfguagUfgUfguuaascsu | 364 | AGUUAACACACUACCGAAUGUGU | 458 |
| AD-193524 | A-382661 | gsusuaagUfuGfAfGfauaguuuucaL96 | 271 | A-382662 | usGfsaaaAfcUfAfucucAfaCfuuaacsusu | 365 | AAGUUAAGUUGAGAUAGUUUUCA | 459 |
| AD-193833 | A-383279 | usgsaaaaUfgCfUfGfgcuauagauaL96 | 272 | A-383280 | usAfsucuAfuAfGfccagCfaUfuuucasusa | 366 | UAUGAAAAUGCUGGCUAUAGAUG | 460 |
| AD-194218 | A-384049 | asgsgaggAfaUfAfCfugaacaucuaL96 | 273 | A-384050 | usAfsgauGfuUfCfaguaUfuCfcuccusgsa | 367 | UCAGGAGGAAUACUGAACAUCUG | 461 |
| AD-193173 | A-381961 | ususuguaUfaGfUfUfaacacacuaaL96 | 274 | A-381962 | usUfsaguGfuGfUfuaacUfaUfacaaasasa | 368 | UUUUUGUAUAGUUAACACACUAC | 462 |
| AD-193690 | A-382993 | asasguauGfuUfCfUfaaccuuuacaL96 | 275 | A-382994 | usGfsuaaAfgGfUfuagaAfcAfuacuususu | 369 | AAAAGUAUGUUCUAACCUUUACA | 463 |
| AD-193907 | A-383427 | usasauuaAfuUfGfGfgccagcuuuuL96 | 276 | A-383428 | asAfsaagCfuGfGfcccaAfuUfaauuasasa | 370 | UUUAAUUAAUUGGGCCAGCUUUU | 464 |
| AD-193633 | A-382879 | csasaagcAfuGfGfGfauuauuagaaL96 | 277 | A-382880 | usUfscuaAfuAfAfucccAfuGfcuuugsasg | 371 | CUCAAAGCAUGGGAUUAUUAGAA | 465 |
| AD-193667 | A-382947 | csusguccUfuGfAfAfggacuaauaaL96 | 278 | A-382948 | usUfsauuAfgUfCfcuucAfaGfgacagsasc | 372 | GUCUGUCCUUGAAGGACUAAUAG | 466 |
| AD-193737 | A-383087 | usasccauGfuAfAfUfggcaguuauaL96 | 279 | A-383088 | usAfsuaaCfuGfCfcauuAfcAfugguasasu | 373 | AUUACCAUGUAAUGGCAGUUAUA | 467 |
| AD-193870 | A-383353 | usasaauaUfgGfAfCfugcucaggaaL96 | 280 | A-383354 | usUfsccuGfaGfCfagucCfaUfauuuasgsa | 374 | UCUAAAUAUGGACUGCUCAGGAA | 468 |
| AD-193176 | A-381967 | gsusauagUfuAfAfCfacacuaccgaL96 | 281 | A-381968 | usCfsgguAfgUfGfuguuAfaCfuauacsasa | 375 | UUGUAUAGUUAACACACUACCGA | 469 |
| AD-193705 | A-383023 | ususuacaUfgAfGfGfacucuauucuL96 | 282 | A-383024 | asGfsaauAfgAfGfuccuCfaUfguaaasgsg | 376 | CCUUUACAUGAGGACUCUAUUCU | 470 |
| AD-193729 | A-383071 | ascsucccAfuUfAfCfcauguaaugaL96 | 283 | A-383072 | usCfsauuAfcAfUfgguaAfuGfggagususa | 377 | UAACUCCCAUUACCAUGUAAUGG | 471 |
| AD-193498 | A-382609 | asasaaagCfuUfUfUfgucuacacaaL96 | 284 | A-382610 | usUfsgugUfaGfAfcaaaAfgCfuuuuusasu | 378 | AUAAAAAGCUUUUGUCUACACAC | 472 |
| AD-193535 | A-382683 | asusaguuUfuCfAfUfccauaacugaL96 | 285 | A-382684 | usCfsaguUfaUfGfgaugAfaAfacuauscsu | 379 | AGAUAGUUUUCAUCCAUAACUGA | 473 |
| AD-193640 | A-382893 | usgsggauUfaUfUfAfgaaucaaacaL96 | 286 | A-382894 | usGfsuuuGfaUfUfcuaaUfaAfucccasusg | 380 | CAUGGGAUUAUUAGAAUCAAACA | 474 |
| AD-193422 | A-382457 | gsgsgaagCfuAfGfUfcuuuugcuuuL96 | 287 | A-382458 | asAfsagcAfaAfAfgacuAfgCfuucccscsu | 381 | AGGGGAAGCUAGUCUUUUGCUUU | 475 |
| AD-193527 | A-382667 | asasguugAfgAfUfAfguuuucaucaL96 | 288 | A-382668 | usGfsaugAfaAfAfcuauCfuCfaacuusasa | 382 | UUAAGUUGAGAUAGUUUUCAUCC | 476 |
| AD-193577 | A-382767 | usasagaaAfuUfUfCfacauagcccaL96 | 289 | A-382768 | usGfsggcUfaUfGfugaaAfuUfucuuasasc | 383 | GUUAAGAAAUUUCACAUAGCCCA | 477 |
| AD-193905 | A-383423 | ususuaauUfaAfUfUfgggccagcuuL96 | 290 | A-383424 | asAfsgcuGfgCfCfcaauUfaAfuuaaasasa | 384 | UUUUUAAUUAAUUGGGCCAGCUU | 478 |
| AD-194089 | A-383791 | ususuucgAfgAfUfUfaucguuuucuL96 | 291 | A-383792 | asGfsaaaAfcGfAfuaauCfuCfgaaaascsc | 385 | GGUUUUCGAGAUUAUCGUUUUCU | 479 |
| AD-193625 | A-382863 | asasucuaCfuCfAfAfagcaugggauL96 | 292 | A-382864 | asUfscccAfuGfCfuuugAfgUfagauusgsa | 386 | UCAAUCUACUCAAAGCAUGGGAU | 480 |
| AD-193875 | A-383363 | asusggacUfgCfUfCfaggaaacgaaL96 | 293 | A-383364 | usUfscguUfuCfCfugagCfaGfuccausasu | 387 | AUAUGGACUGCUCAGGAAACGAG | 481 |
| AD-194234 | A-384081 | asuscugaGfuCfCfUfggaugauacuL96 | 294 | A-384082 | asGfsuauCfaUfCfcaggAfcUfcagausgsu | 388 | ACAUCUGAGUCCUGGAUGAUACU | 482 |
| AD-193311 | A-382236 | uscsucugAfuGfCfAfgcuuauacgaL96 | 295 | A-382237 | usCfsguaUfaAfGfcugcAfuCfagagascsa | 389 | UGUCUCUGAUGCAGCUUAUACGA | 483 |
| AD-193744 | A-383101 | usasauggCfaGfUfUfauauuuugcaL96 | 296 | A-383102 | usGfscaaAfaUfAfuaacUfgCfcauuascsa | 390 | UGUAAUGGCAGUUAUAUUUUGCA | 484 |
| AD-193877 | A-383367 | gsgsacugCfuCfAfGfgaaacgagaaL96 | 297 | A-383368 | usUfscucGfuUfUfccugAfgCfaguccsasu | 391 | AUGGACUGCUCAGGAAACGAGAC | 485 |
| AD-192647 | A-380909 | gsusgcaaAfcUfUfGfucgggaggaaL96 | 298 | A-380910 | usUfsccuCfcCfGfacaaGfuUfugcacsasa | 392 | UUGUGCAAACUUGUCGGGAGGAG | 486 |

### Example 3—Knockdown of HMGB1 Expression with a Single Dose of HMGB1 siRNA

[0668] A series of dsRNA agents targeting mouse HMGB1 were designed and tested for the ability to knockdown expression of HMGB1 mRNA in 6-8 week old C57Bl/6 female mice. The duplexes are listed in Table 6.

[0669] Duplex AD-80644 includes a single mismatch at position 1 in the antisense strand as compared to the human mRNA sequence. Duplexes AD-80652 and AD-80653 are a perfect match in the antisense strand as compared to the human mRNA sequence. Duplexes AD-80646, AD-80651, and AD80652 include multiple mismatches between the mouse and human sequences.

[0670] A single dose of six selected dsRNA agents; or PBS control, were administered subcutaneously on day 1 as a dose of 3 mg/kg (n=3 per group). At days 7 and 21 post-dosing, mice were fasted for 5 hours prior to sacrifice to clear glycogen from the liver in order to facilitate liver imaging, livers were harvested, and HMGB1 expression was analyzed.

[0671] RNA was isolated using the RNeasy plus kit (Qiagen, Cat #74136). 1 μg of total RNA was transcribed to cDNA using ABI® High capacity cDNA reverse transcription kit (Applied Biosystems, Cat #4368813), both following manufacturer's protocol.

[0672] One μl of cDNA was added to a master mix containing 0.5 μl of GAPDH TAQMAN™ (TaqMan) Probe (4352339E), 0.5 μl mouse HMGB1 probe (Mm00849805_gH), 5 μl Lightcycler 480 probe master mix (Roche Cat #04887301001) and 3 μl of nuclease free water per well in a 384-well plate (Roche Cat #04887301001). Reactions were run in triplicate. Real time PCR was done in a LightCycler480 Real Time PCR system (Roche). To calculate relative fold change, real time data were analyzed using the AACt method and normalized to PBS treated animals. Results are shown in the table below.

| | Day7 | stdev | Day 21 | stdev |
|---|---|---|---|---|
| PBS | 101.6365 | 21.35079 | 100.0892 | 5.139943 |
| AD-80644 | 17.72006 | 0.911535 | 21.8557 | 4.188224 |
| AD-80646 | 16.06716 | 3.34729 | 19.21384 | 3.47529 |
| AD-80648 | 67.76202 | 7.184302 | 103.9695 | 16.18052 |
| AD-80651 | 18.60321 | 0.45585 | 30.74869 | 8.934711 |
| AD-80652 | 11.1124 | 1.73809 | 14.60145 | 1.346553 |
| AD-80653 | 10.98006 | 1.528939 | 14.96498 | 3.3726 |

[0673] Based on these data, duplex AD-80653 was selected for further studies.

TABLE 6
HMGB1 Modified Sequences

| | Strand | | | | | |
|---|---|---|---|---|---|---|
| | (S = | | | | | |
| | Sense; | | | SEQ | | SEQ |
| Duplex | AS = | Oligo | Oligo Sequence | ID | Oligo Sequence | ID |
| Name | Antisense) | Name | (modified) 5′ to 3′ | NO: | (unmodified) 5′ to 3′ | NO: |
| AD-80644 | S | A-161392 | gsusaagaUfuUfGfUfuuuuaaacuaL96 | 487 | GUAAGAUUUGUUUUUAAACUA | 499 |
| | AS | A-161393 | VPusAfsguuUfaAfAfaacaAfaUfcuuacsasc | 488 | UAGUUUAAAAACAAAUCUUACAC | 500 |
| AD-80646 | S | A-161396 | ascsgaagAfuAfAfUfuguuguucuaL96 | 489 | ACGAAGAUAAUUGUUGUUCUA | 501 |
| | AS | A-161397 | VPusAfsgaaCfaAfCfaauuAfuCfuucgusasu | 490 | UAGAACAACAAUUAUCUUCGUAU | 502 |
| AD-80648 | S | A-161400 | csasucccUfaAfUfCfuauacauauaL96 | 491 | CAUCCCUAAUCUAUACAUAUA | 503 |
| | AS | A-161401 | VPusAfsuauGfuAfUfagauUfaGfggaugscsu | 492 | UAUAUGUAUAGAUUAGGGAUGCU | 504 |
| AD-80651 | S | A-161406 | usgsgaguGfcUfGfUfuauauaauuaL96 | 493 | UGGAGUGCUGUUAUAUAAUUA | 505 |
| | AS | A-161407 | VPusAfsauuAfuAfUfaacaGfcAfcuccasusc | 494 | UAAUUAUAUAACAGCACUCCAUC | 506 |
| AD-80652 | S | A-161408 | gscsacagCfaCfAfAfauuaguuauaL96 | 495 | GCACAGCACAAAUUAGUUAUA | 507 |
| | AS | A-161409 | VPusAfsuaaCfuAfAfuuugUfgCfugugcsasc | 496 | UAUAACUAAUUUGUGCUGUGCAC | 508 |
| AD-80653 | S | A-161410 | csusgaauGfcUfUfCfuaaguaaauaL96 | 497 | CUGAAUGCUUCUAAGUAAAUA | 509 |
| | AS | A-161411 | VPusAfsuuuAfcUfUfagaaGfcAfuucagsasa | 498 | UAUUUACUUAGAAGCAUUCAGAA | 510 |

### Example 4—Treatment of HMGB1-Associated Disorder with an HMGB1 siRNA

[0674] A high fat-high fructose (HF HFr) fed mouse model of NASH (Softic et al. J Clin Invest 127 (11): 4059-4074, 2017, incorporated herein by reference) was used to demonstrate the efficacy of HMGB1 siRNA to treat NASH and signs of metabolic disorder.

[0675] Six to eight weeks-old C57BL/6 male mice obtained from Jackson Laboratories were fed a high fat diet containing 60% of calories as fat plus 30% fructose in water (Hf Hfr diet) for 12 weeks prior to treatment with a dsRNA agent in order to induce NASH or fed a standard chow and water diet. Food and water were provided ad libitum. As expected, body weight and liver weight were significantly higher in the HF HFr fed mice. Liver injury was indicated by a significant increase in serum glutamate dehydrogenase (GLDH), alanine aminotransferase (ALT), and aspartate aminotransferase (AST) levels, in the Hf Hfr mice. Liver histology was assessed to confirm the development of NASH. Vacuolation, inflammation, ballooning degeneration, and fibrosis were observed in mice fed the Hf Hfr diet, but in none of the mice fed standard chow. These data demonstrate that the Hf Hfr diet was effective in establishing a NASH phenotype. A number of signs related to metabolic syndrome were also observed as a result of the Hf Hfr diet including increased serum insulin and glucose and increased serum cholesterol.

[0676] Starting at week 12, HF HFr fed mice were subcutaneously administered a 10 mg/kg dose of an siRNA targeted to HMGB1 (AD-80653) every other week for a total of four doses. Two weeks after the final dose (at week 20), livers were harvested, RNA was isolated, and HMGB1 knockdown was determined by rtPCR using the method described above. A 94% decrease in liver HMGB1 mRNA was observed in the HMGB1 siRNA treated Hf Hfr fed mice as compared to the PBS treated HF HFr fed mice.

[0677] Treatment with the HMGB1 siRNA ameliorated some of the adverse effects of the Hf Hfr diet by decreasing liver weight as a percent of body weight and decreasing liver triglyceride levels. The results are shown in the table below.

| | | | | | % decrease |
|---|---|---|---|---|---|
| | | | | | in HF |
| | | HF | HF HFr + | | HFr + |
| Parameters | LFD + PBS | HFr + PBS | HMGB1 | | HMGB1 vs |
| at week 20 | (N = 5) | (N = 9) | (N = 9) | p values | HF HFr + PBS |
| Liver weight (% BW) | 4.16 +/− 0.19 | 6.35 +/− 0.46 | 5.10 +/− 0.24 | 0.08 | 20 |
| Liver Triglycerides | 21.96 +/− 3.02 | 77.21 +/− 5.41 | 36.39 +/− 3.84 | 0.001 | 53 |
| (mg/g of liver) | | | | | |

[0678] Each value represents the mean+/−SEM. The p values are derived from statistical analysis using one-way ANOVA and depicts comparison between HF HFr+PBS and HF HFr+HMGB1.

[0679] Serum cholesterol was also significantly decreased (56%, p=0.0001) in the HMGB1 siRNA treated HF HFr mice as compared to the HF HFr PBS treated mice.

[0680] Treatment with the HMGB1 siRNA also normalized the expression of genes related to lipid metabolism as shown in the table below. Values are expressed as a relative fold change from HF HFr+PBS.

| | | HF | HF HFr + | |
|---|---|---|---|---|
| | LFD + PBS | HFr + PBS | HMGB1 | |
| Genes | (N = 5) | (N = 9) | (N = 9) | p values |
| SREBP2 | 1.3 +/− 0.08 | 1.03 +/− 0.08 | 0.76 +/− 0.05 | 0.01 |
| ACC2 | 1.06 +/− 0.08 | 1.02 +/− 0.07 | 0.46 +/− 0.02 | 0.0001 |
| SCD1 | 0.72 +/− 0.13 | 1.03 +/− 0.09 | 0.73 +/− 0.06 | 0.03 |
| HMG Co-A | 0.63 +/− 0.1 | 1.04 +/− 0.1 | 0.58 +/− 0.02 | 0.0005 |
| reductase | | | | |
| PCSK9 | 0.96 +/− 0.2 | 1.09 +/− 0.17 | 0.42 +/− 0.04 | 0.0026 |

[0681] Each value represents the mean+/−SEM. The p values are derived from statistical analysis using one-way ANOVA and depicts comparison between HF HFr+PBS and HF HFr+HMGB1.

[0682] Treatment with the HMGB1 siRNA also improved some mean NAS and fibrosis scores based on histopathological data as shown below.

| Histopathology | | HF | HF HFr + | |
|---|---|---|---|---|
| and NAS score at | LFD + PBS | HFr + PBS | HMGB1 | |
| week 20 | (N = 5) | (N = 9) | (N = 9) | p values |
| Steatosis score | 0 | 2.88 +/− 0.1 | 2.44 +/− 0.2 | 0.03 |
| Lobular | 0 | 1.7 +/− 0.2 | 1.0 +/− 0 | 0.0001 |
| inflammation | | | | |
| Ballooning | 0 | 1.0 +/− 0 | 1.0 +/− 0 | 1 |
| Mean NAS score | 0 | 5.6 +/− 0.2 | 4.4 +/− 0.2 | 0.003 |
| Fibrosis score | 0 | 1 +/− 0.2 | 0.56 +/− 0.2 | 0.3 |

[0683] Each value represents the mean+/−SEM. The p values are derived from statistical analysis using one way ANOVA and depicts comparison between HF HFr+PBS and HF HFr+HMGB1.

[0684] No significant changes in expression of inflammation or fibrosis genes, serum biomarkers of liver injury, or serum insulin or glucose were observed.

[0685] A second experiment was performed using the same mouse model and dosing regimen described above. Some of the endpoints assayed were different in the second study. The results of this study are provided below.

[0686] Briefly, as described above, 6-8 weeks-old C57BL/6 male mice obtained from Jackson Laboratories were fed a high fat diet containing 60% of calories as fat plus 30% fructose in water (Hf Hfr diet) for 12 weeks prior to treatment in order to induce NASH, or fed a standard chow and water diet.

[0687] Starting at week 12, HF HFr fed mice were subcutaneously administered a 10 mg/kg dose of an siRNA targeted to HMGB1 (AD-80653) every other week for a total of four doses. Two weeks after the final dose (at week 20), livers were harvested, RNA was isolated, and HMGB1 knockdown was determined by rtPCR using the method described above. A 90% decrease in liver HMGB1 mRNA was observed in the HMGB1 siRNA treated Hf Hfr fed mice as compared to the PBS treated HF HFr fed mice.

[0688] Treatment with the HMGB1 siRNA ameliorated some of the adverse effects of the Hf Hfr diet by decreasing liver weight as a percent of body weight, liver triglyceride, liver free-cholesterol, and liver free fatty acid levels. The results are shown in the table below.

| | | | | | % decrease in HF |
|---|---|---|---|---|---|
| Parameters at | LFD + PBS | HF HFr + PBS | HF HFr + HMGB1 | | HFr + HMGB1 vs HF |
| week 20 | (N = 5) | (N = 9) | (N = 9) | P values | HFr + PBS |
| Liver weight | 4.17 +/− 0.21 | 6.37 +/− 0.23 | 5.07 +/− 0.19 | 0.01 | 20.5 |
| (% BW) | | | | | |
| Liver | 22.25 +/− 1.74 | 110.95 +/− 3.27 | 50.78 +/− 5.28 | 0.0001 | 54.2 |
| Triglycerides | | | | | |
| (mg/g of liver) | | | | | |
| Liver Free- | 2.30 +/− 0.03 | 3.10 +/− 0.08 | 2.50 +/− 0.1 | 0.0006 | 19.4 |
| Cholesterol | | | | | |
| (mg/g of liver) | | | | | |
| Liver Free Fatty | 1.86 +/− 0.06 | 2.55 +/− 0.09 | 1.98 +/− 0.09 | 0.0002 | 22.3 |
| Acids | | | | | |

[0689] Each value represents the mean+/−SEM. The p values are derived from statistical analysis using one-way ANOVA and depicts comparison between HF HFr+PBS and HF HFr+HMGB1.

[0690] Treatment with HMGB1 siRNA also resulted in a decrease in serum cholesterol, LDL cholesterol and serum non-esterified fatty acids (NEFA). There was an increase in the serum triglyceride levels seen with HMGB1 siRNA treatment. The results are shown in the table below.

| | | | | | % decrease in HF |
|---|---|---|---|---|---|
| Parameters at | LFD + PBS | HF HFr + PBS | HF HFr + HMGB1 | | HFr + HMGB1 vs |
| week 20 | (N = 5) | (N = 9) | (N = 9) | p values | HF HFr + PBS |
| Serum | 80.36 +/− 1.75 | 229.1 +/− 17.65 | 102.6 +/− 6.72 | 0.0001 | 55.2 |
| Cholesterol | | | | | |
| (mg/dL) | | | | | |
| Serum | 73.68 +/− 4.73 | 71.79 +/− 5.8 | 94.44 +/− 5.35 | 0.008 | −31.9 |
| Triglycerides | | | | | |
| (mg/dL) | | | | | |
| Serum NEFA | 0.88 +/− 0.06 | 0.92 +/− 0.06 | 0.74 +/− 0.04 | 0.04 | 19 |
| (mM) | | | | | |
| Serum LDL | 7 +/− 0 | 12.62 +/− 1.57 | 7.71 +/− 0.32 | 0.0001 | 20.4 |
| Cholesterol | | | | | |
| (mg/dL) | | | | | |

Each value represents the mean+/−SEM. The p values are derived from statistical analysis using one-way ANOVA and depicts comparison between HF HFr+PBS and HF HFr+HMGB1.

[0691] Treatment with the HMGB1 siRNA also improved mean NAS and fibrosis scores based on histopathological data as shown in the Table below.

| Histopathology | LFD + | HF | HF HFr + | |
|---|---|---|---|---|
| and NAS score | PBS | HFr + PBS | HMGB1 | |
| at week 20 | (N = 5) | (N = 9) | (N = 9) | p value |
| Steatosis score | 0 | 2.9 +/− 0.1 | 1.5 +/− 0.24 | <0.0001 |
| Lobular | 0 | 1.0 +/− 0 | 0.4 +/− 0.18 | 0.02 |
| inflammation | | | | |
| Ballooning | 0 | 0.3 +/− 0.17 | 0 +/− 0 | 0.16 |
| Mean NAS score | 0 | 4.2 +/− 0.22 | 2 +/− 0.37 | 0.0001 |

[0692] Each value represents the mean+/−SEM. The p values are derived from statistical analysis using one way ANOVA and depicts comparison between HF HFr+PBS and HF HFr+HMGB1.

[0693] Treatment with the HMGB1 siRNA also mildly reduced serum ALT, AST, and glutamate dehydrogenase (GLDH).

[0694] These data demonstrate that HMGB1 siRNA is effective in the treatment of HMGB1-associated disorders, e.g., metabolic disorder and NAFLD, e.g., NASH.

### Example 5—Knockdown of HMGB1 Expression with a Single Dose of HMGB1 siRNA

[0695] A series of dsRNA agents targeting mouse HMGB1 were designed and tested for the ability to knockdown expression of HMGB1 mRNA in 6-8 week old C57Bl/6 female mice. The duplexes that were assessed are listed in Table 7 below.

TABLE 7
HMGB1 Unmodified and Modified Sequences

| | | | SEQ | | SEQ | Target site |
|---|---|---|---|---|---|---|
| Duplex | | Unmodified | ID | | ID | in |
| Name | Strand | sequence 5′ to 3′ | NO | Modified sequence 5′ to 3′ | NO | NM_002128.5 |
| AD-245281 | sense | UAAGUUGGUUCUAGCGCAGUU | 511 | usasaguuGfgUfUfCfuagcgcaguuL96 | 525 | 830-850 |
| | antisense | AACUGCGCUAGAACCAACUUAUU | 512 | asAfscugc(Ggn)cuagaaCfcAfacuuasusu | 526 | 828-850 |
| AD-245282 | sense | AAGUUGGUUCUAGCGCAGUUU | 513 | asasguugGfuUfCfUfagcgcaguuuL96 | 527 | 831-851 |
| | antisense | AAACUGCGCUAGAACCAACUUAU | 514 | asAfsacug(Cgn)gcuagaAfcCfaacuusasu | 528 | 829-851 |
| AD-245305 | sense | UUGAAAUGUAAGGCUGUGUAA | 515 | ususgaaaUfgUfAfAfggcuguguaaL96 | 529 | 917-937 |
| | antisense | UUACACAGCCUUACAUUUCAAUU | 516 | usUfsacac(Agn)gccuuaCfaUfuucaasusu | 530 | 915-937 |
| AD-245336 | sense | UAUAGUUAACACACUACCGAA | 517 | usasuaguUfaAfCfAfcacuaccgaaL96 | 531 | 972-992 |
| | antisense | UUCGGUAGUGUGUUAACUAUACA | 518 | usUfscggu(Agn)guguguUfaAfcuauascsa | 532 | 970-992 |
| AD-245339 | sense | AGUUAACACACUACCGAAUGU | 519 | asgsuuaaCfaCfAfCfuaccgaauguL96 | 533 | 975-995 |
| | antisense | ACAUUCGGUAGUGUGUUAACUAU | 520 | asCfsauuc(Ggn)guagugUfgUfuaacusasu | 534 | 973-995 |
| AD-245383 | sense | UGGUAUUUUCAAUAGCCACUA | 521 | usgsguauUfuUfCfAfauagccacuaL96 | 535 | 1019-1039 |
| | antisense | UAGUGGCUAUUGAAAAUACCACC | 522 | usAfsgugg(Cgn)uauugaAfaAfuaccascsc | 536 | 1017-1039 |
| AD-245472 | sense | UCUGAUGCAGCUUAUACGAAA | 523 | uscsugauGfcAfGfCfuuauacgaaaL96 | 537 | 1160-1180 |
| | antisense | UUUCGUAUAAGCUGCAUCAGAGA | 524 | usUfsucgu(Agn)uaagcuGfcAfucagasgsa | 538 | 1158-1180 |

[0696] A single dose of one of the dsRNA agents; or PBS control, was administered subcutaneously on day 1 at a dose of 10 mg/kg (n=3 per group). At day 14 post dosing, mice were sacrificed, livers were harvested, and HMGB1 expression was analyzed.

[0697] RNA was isolated using the RNeasy plus kit (Qiagen, Cat #74136). One μg of total RNA was transcribed to cDNA using ABI® High capacity cDNA reverse transcription kit (Applied Biosystems, Cat #4368813), both following manufacturer's protocol.

[0698] One μl of cDNA was added to a master mix containing 0.5 μl of GAPDH TAQMAN™ (TaqMan) Probe (4352339E), 0.5 μl mouse HMGB1 probe (Mm00849805_gH), 5 μl Lightcycler 480 probe master mix (Roche Cat #04887301001) and 3 μl of nuclease free water per well in a 384-well plate (Roche Cat #04887301001). Reactions were run in triplicate. Real time PCR was done in a LightCycler480 Real Time PCR system (Roche). To calculate relative fold change, real time data were analyzed using the AACt method and normalized to PBS treated animals. Results are shown in Table 8.

TABLE 8

| Duplex Name | Average | SEM |
|---|---|---|
| PBS | 1.00 | 0.06 |
| AD-245281 | 0.15 | 0.02 |
| AD-245282 | 0.13 | 0.02 |
| AD-245305 | 0.26 | 0.02 |
| AD-245336 | 0.23 | 0.01 |
| AD-245339 | 0.19 | 0.03 |
| AD-245383 | 0.28 | 0.02 |
| AD-245472 | 0.20 | 0.02 |

### EQUIVALENTS

[0699] Those skilled in the art will recognize, or be able to ascertain using no more than routine experimentation, many equivalents to the specific embodiments and methods described herein. Such equivalents are intended to be encompassed by the scope of the following claims.

The application's sequence listing, which the Patent Office published only in electronic form, follows.

SEQUENCE LISTING (540 sequences)

SEQ ID NO: 1 - DNA, 4273 bp, Homo sapiens
  source 1..4273: mol_type = unassigned DNA
gccaataggagccgcgctggctggagagtaatgttacagagcggagagagtgaggaggctgcgtctggctcccgctctcacagccattgcagtacattgagctccatagagacagcgccggggcaagtgagagccggacgggcactgggcgactctgtgcctcgctgaggaaaaataactaaacatgggcaaaggagatcctaagaagccgagaggcaaaatgtcatcatatgcattttttgtgcaaacttgtcgggaggagcataagaagaagcacccagatgcttcagtcaacttctcagagttttctaagaagtgctcagagaggtggaagaccatgtctgctaaagagaaaggaaaatttgaagatatggcaaaagcggacaaggcccgttatgaaagagaaatgaaaacctatatccctcccaaaggggagacaaaaaagaagttcaaggatcccaatgcacccaagaggcctccttcggccttcttcctcttctgctctgagtatcgcccaaaaatcaaaggagaacatcctggcctgtccattggtgatgttgcgaagaaactgggagagatgtggaataacactgctgcagatgacaagcagccttatgaaaagaaggctgcgaagctgaaggaaaaatacgaaaaggatattgctgcatatcgagctaaaggaaagcctgatgcagcaaaaaagggagttgtcaaggctgaaaaaagcaagaaaaagaaggaagaggaggaagatgaggaagatgaagaggatgaggaggaggaggaagatgaagaagatgaagatgaagaagaagatgatgatgatgaataagttggttctagcgcagttttttttttcttgtctataaagcatttaacccccctgtacacaactcactccttttaaagaaaaaaattgaaatgtaaggctgtgtaagatttgtttttaaactgtacagtgtctttttttgtatagttaacacactaccgaatgtgtctttagatagccctgtcctggtggtattttcaatagccactaaccttgcctggtacagtatgggggttgtaaattggcatggaaatttaaagcaggttcttgttggtgcacagcacaaattagttatatatggggatggtagttttttcatcttcagttgtctctgatgcagcttatacgaaataattgttgttctgttaactgaataccactctgtaattgcaaaaaaaaaaaaaaagttgcagctgttttgttgacattctgaatgcttctaagtaaatacaattttttttattagtattgttgtccttttcataggtctgaaatttttcttcttgaggggaagctagtcttttgcttttgcccattttgaatcacatgaattattacagtgtttatcctttcatatagttagctaataaaaagcttttgtctacacaccctgcatatcataatgggggtaaagttaagttgagatagttttcatccataactgaacatccaaaatcttgatcagttaagaaatttcacatagcccacttacatttacaaactgaagagtaatcaatctactcaaagcatgggattattagaatcaaacattttgaaagtctgtccttgaaggactaatagaaaagtatgttctaacctttacatgaggactctattctttaactcccattaccatgtaatggcagttatattttgcagttcccacattaaagaagacctgagaatgtatccccaaaagcgtgagcttaaaatacaagactgccatattaaattttttgttgacattagtctcagtgaagactatgaaaatgctggctatagatgtcttttcccatttatctaaatatggactgctcaggaaacgagactttccattacaagtatttttaattaattgggccagcttttcaaacaaagatgccacattcaaaatagggtatattttcctatattacggtttgcccctttataaatccaagtagataggaagaaagaagacaaactttgcatctcagtatgaattattcaatttatttgaatgatttttctttacaaaacaaactcattcattagtcatgtttatctgcttaggagtttagggaacaatttggcaattttgtggttttcgagattatcgttttcttaaagtgccagtattttaaaatagcgttcttgtaattttacacgcttttgtgatggagtgctgttttgttatataatttagacttggattctttccatttgcatttgtttatgtaatttcaggaggaatactgaacatctgagtcctggatgatactaataaactaataattgcagaggttttaaatactagttaaatggctttcacttaagaacttaagattttgttacatatttttaaatcttgtttctaataatacctcttagcagtaccttttaaataagtataagggatggcaaagtttttccctttaaaaatactcactttatgcttataaataggttaatgggctgataaaaggttttgtcaaacattgcaagtattcggtgctatatataaaggaggaaaaactagttttactttcagaatgatttaaacaagatttttaaaaacaagatacatgcaagcgaacagcagggttagtgataggctgcaattgtgtcgaacatcagattttttgttaagaggagcaaatgactcaatctgatttagatggaagtttctactgtatagaaatcaccattaatcaccaacattaataattctgatccatttaaaatgaattctggctcaaggagaatttgtaactttagtaggtacgtcatgacaactaccatttttttaagatgttgagaatgggaacagtttttttagggtttattcttgaccacagatcttaagaaaatggacaaaacccctcttcaatctgaagattagtatggtttggtgttctaacagtatcccctagaagttggatgtctaaaactcaagtaaatggaagtgggaggcaatttagataagtgtaaagccttgtaactgaagatgattttttttagaaagtgtatagaaactattttaatgccaagatagttacagtgctgtggggtttaaagactttgttgacatcaagaaaagactaaatctataattaattgggccaacttttaaaatgaagatgctttttaaaactaatgaactaagatgtataaatcttagtttttttgtattttaaagataggcatatggcatattgattaacgagtcaaatttcctaactttgctgtgcaaaggttgagagctattgctgattagttaccacagttctgatgatcgtcccatcacagtgttgttaatgtttgctgtatttattaattttcttaaagtgaaatctgaaaaatgaaatttgtgtgtcctgtgtacccgaggggtaatgattaaatgataaagataagaaaagcgcccatgtaacacaaactgccattcaacaggtatttcccttactacctaaggaattgtaaccattgctcagacattgtaggatttaactatgttgaaaactacaggagaggccgggcgcagtggctcacgcctgtaatcccagcactttgggaggccaaggcgggcagatcacgaggtcaggagattgagaccatcctggctaacgtggtgaaaccccgcctctactaaaaatacaaaaaattagccaagcgtggtgctgggcgcctgtagtcccagtaactcaggaggctgaggcaggagaatggcgtgaacccgggaggcggaggttgcagtgagccgagattgtgccactgcactccagcctgggtgacagagcaagactccatctcaaaaaaaaaaaaaaaacacaggagagacaactggtttttgaatgaaatacatgggtactgccttgcttgacatcacatagtccttgatgaaagttcacatttaggtctgcttggtacaatacgcctcctaaaaaggtccttgatgaaagttcacatttaggtctgcttggtacaacacgcctcctgaaagggtctgatagctttcagtagcagtaagacacttgcatgtgatggtaaggtatctgcaaatttgcacacaccgtacacagcttaagtcttagaattaacttgctaaaatgtgagcctttggtaattaggctgttttattagggagtgtgataatatttgaatttcttttcatatttgtgctttgtgtcattttcaaatgacccttgaaatgtattttaaaagtagataaaagccagaaagtga

SEQ ID NO: 2 - DNA, 4273 bp, Homo sapiens
  source 1..4273: mol_type = unassigned DNA
tcactttctggcttttatctacttttaaaatacatttcaagggtcatttgaaaatgacacaaagcacaaatatgaaaagaaattcaaatattatcacactccctaataaaacagcctaattaccaaaggctcacattttagcaagttaattctaagacttaagctgtgtacggtgtgtgcaaatttgcagataccttaccatcacatgcaagtgtcttactgctactgaaagctatcagaccctttcaggaggcgtgttgtaccaagcagacctaaatgtgaactttcatcaaggacctttttaggaggcgtattgtaccaagcagacctaaatgtgaactttcatcaaggactatgtgatgtcaagcaaggcagtacccatgtatttcattcaaaaaccagttgtctctcctgtgttttttttttttttttgagatggagtcttgctctgtcacccaggctggagtgcagtggcacaatctcggctcactgcaacctccgcctcccgggttcacgccattctcctgcctcagcctcctgagttactgggactacaggcgcccagcaccacgcttggctaattttttgtatttttagtagaggcggggtttcaccacgttagccaggatggtctcaatctcctgacctcgtgatctgcccgccttggcctcccaaagtgctgggattacaggcgtgagccactgcgcccggcctctcctgtagttttcaacatagttaaatcctacaatgtctgagcaatggttacaattccttaggtagtaagggaaatacctgttgaatggcagtttgtgttacatgggcgcttttcttatctttatcatttaatcattacccctcgggtacacaggacacacaaatttcatttttcagatttcactttaagaaaattaataaatacagcaaacattaacaacactgtgatgggacgatcatcagaactgtggtaactaatcagcaatagctctcaacctttgcacagcaaagttaggaaatttgactcgttaatcaatatgccatatgcctatctttaaaatacaaaaaaactaagatttatacatcttagttcattagttttaaaaagcatcttcattttaaaagttggcccaattaattatagatttagtcttttcttgatgtcaacaaagtctttaaaccccacagcactgtaactatcttggcattaaaatagtttctatacactttctaaaaaaaatcatcttcagttacaaggctttacacttatctaaattgcctcccacttccatttacttgagttttagacatccaacttctaggggatactgttagaacaccaaaccatactaatcttcagattgaagaggggttttgtccattttcttaagatctgtggtcaagaataaaccctaaaaaaactgttcccattctcaacatcttaaaaaaatggtagttgtcatgacgtacctactaaagttacaaattctccttgagccagaattcattttaaatggatcagaattattaatgttggtgattaatggtgatttctatacagtagaaacttccatctaaatcagattgagtcatttgctcctcttaacaaaaaatctgatgttcgacacaattgcagcctatcactaaccctgctgttcgcttgcatgtatcttgtttttaaaaatcttgtttaaatcattctgaaagtaaaactagtttttcctcctttatatatagcaccgaatacttgcaatgtttgacaaaaccttttatcagcccattaacctatttataagcataaagtgagtatttttaaagggaaaaactttgccatcccttatacttatttaaaaggtactgctaagaggtattattagaaacaagatttaaaaatatgtaacaaaatcttaagttcttaagtgaaagccatttaactagtatttaaaacctctgcaattattagtttattagtatcatccaggactcagatgttcagtattcctcctgaaattacataaacaaatgcaaatggaaagaatccaagtctaaattatataacaaaacagcactccatcacaaaagcgtgtaaaattacaagaacgctattttaaaatactggcactttaagaaaacgataatctcgaaaaccacaaaattgccaaattgttccctaaactcctaagcagataaacatgactaatgaatgagtttgttttgtaaagaaaaatcattcaaataaattgaataattcatactgagatgcaaagtttgtcttctttcttcctatctacttggatttataaaggggcaaaccgtaatataggaaaatataccctattttgaatgtggcatctttgtttgaaaagctggcccaattaattaaaaatacttgtaatggaaagtctcgtttcctgagcagtccatatttagataaatgggaaaagacatctatagccagcattttcatagtcttcactgagactaatgtcaacaaaaaatttaatatggcagtcttgtattttaagctcacgcttttggggatacattctcaggtcttctttaatgtgggaactgcaaaatataactgccattacatggtaatgggagttaaagaatagagtcctcatgtaaaggttagaacatacttttctattagtccttcaaggacagactttcaaaatgtttgattctaataatcccatgctttgagtagattgattactcttcagtttgtaaatgtaagtgggctatgtgaaatttcttaactgatcaagattttggatgttcagttatggatgaaaactatctcaacttaactttacccccattatgatatgcagggtgtgtagacaaaagctttttattagctaactatatgaaaggataaacactgtaataattcatgtgattcaaaatgggcaaaagcaaaagactagcttcccctcaagaagaaaaatttcagacctatgaaaaggacaacaatactaataaaaaaaattgtatttacttagaagcattcagaatgtcaacaaaacagctgcaactttttttttttttttgcaattacagagtggtattcagttaacagaacaacaattatttcgtataagctgcatcagagacaactgaagatgaaaaaactaccatccccatatataactaatttgtgctgtgcaccaacaagaacctgctttaaatttccatgccaatttacaacccccatactgtaccaggcaaggttagtggctattgaaaataccaccaggacagggctatctaaagacacattcggtagtgtgttaactatacaaaaaaagacactgtacagtttaaaaacaaatcttacacagccttacatttcaatttttttctttaaaaggagtgagttgtgtacaggggggttaaatgctttatagacaagaaaaaaaaaactgcgctagaaccaacttattcatcatcatcatcttcttcttcatcttcatcttcttcatcttcctcctcctcctcatcctcttcatcttcctcatcttcctcctcttccttctttttcttgcttttttcagccttgacaactcccttttttgctgcatcaggctttcctttagctcgatatgcagcaatatccttttcgtatttttccttcagcttcgcagccttcttttcataaggctgcttgtcatctgcagcagtgttattccacatctctcccagtttcttcgcaacatcaccaatggacaggccaggatgttctcctttgatttttgggcgatactcagagcagaagaggaagaaggccgaaggaggcctcttgggtgcattgggatccttgaacttcttttttgtctcccctttgggagggatataggttttcatttctctttcataacgggccttgtccgcttttgccatatcttcaaattttcctttctctttagcagacatggtcttccacctctctgagcacttcttagaaaactctgagaagttgactgaagcatctgggtgcttcttcttatgctcctcccgacaagtttgcacaaaaaatgcatatgatgacattttgcctctcggcttcttaggatctcctttgcccatgtttagttatttttcctcagcgaggcacagagtcgcccagtgcccgtccggctctcacttgccccggcgctgtctctatggagctcaatgtactgcaatggctgtgagagcgggagccagacgcagcctcctcactctctccgctctgtaacattactctccagccagcgcggctcctattggc

SEQ ID NO: 3 - DNA, 2855 bp, Mus musculus
  source 1..2855: mol_type = unassigned DNA
cgcgctggctggagagtaatgttacagagcggagagagtgaggaggctgcgtctggctcccgctctcacagccattgcagtacattgagctccatagagacagcgccggggcaagcgcgagccggacgggcactgggcgactctgtgcctcgcggaggaaaatcaactaaacatgggcaaaggagatcctaaaaagccgagaggcaaaatgtcctcatatgcattctttgtgcaaacttgccgggaggagcacaagaagaagcacccggatgcttctgtcaacttctcagagttctccaagaagtgctcagagaggtggaagaccatgtctgctaaagaaaaggggaaatttgaagatatggcaaaggctgacaaggctcgttatgaaagagaaatgaaaacctacatcccccccaaaggggagaccaaaaagaagttcaaggaccccaatgcacccaagaggcctccttcggccttcttcttgttctgttctgagtaccgccccaaaatcaaaggcgagcatcctggcttatccattggtgatgttgcaaagaaactaggagagatgtggaacaacactgcagcagatgacaagcagccctatgagaagaaagctgccaagctgaaggagaagtatgagaaggatattgctgcctacagagctaaaggaaaacctgatgcagcgaaaaagggggtggtcaaggctgaaaagagcaagaaaaagaaggaagaggaagatgatgaggaggatgaagaggatgaggaagaggaggaagaagaggaagacgaagatgaagaagaagatgatgatgatgaataagttggttctagcgcagtttttttttcttgtctataaagcatttaacccccctgtacacaactcactccttttaaagaaaaaaattgaaatgtaaggctgtgtaagatttgtttttaaactgtacagtgtctttttttgtatagttaacacactaccgaatgtgtctttagatagccctgtcctggtggtattttcaatagccactaaccttgcctggtacagtctgggggttgtaaattggcatggaaatttaaagcaggttcttgttggtgcacagcacaaattagttatatatggggacagtagtttggttttttgtttttttttttttttcttttggttttctttttgggttttatttttttcatcttcagttgtctctgatgcagcttatacgaagataattgttgttctgttaactgaataccactctgtaattgcaaaaaaaaaattgcggctgttttgttgacattctgaatgcttctaagtaaatacaattttttttattagtattgttgtccttttcataggtctgaaagttttcttctcaaggggaagctagtcttttgctttgcccattttgggtcacatggattattagtgtgttatctttcatctagttagctggaagagagcttttgtccacatgccctgccattgtggtagggtaacattttcatccatagttgaagaatctcctaaatcgtgatagttggataagagatattatataacctacttggcaaagcaaggagtgatcaatactgtcacaccgtgggactattaggatcaagcaatctgaacgtctgtccttgaaggactgatagaaaagtaccttctaatccttacacgaggactctcctttaaccgccattactgtgtaatgacagttatattttgcagtttcccctactaaagaagacctgagaatgtatccccaaaagtgtgagcttaaaatacaagactgctgtactatttgttgaccttagtcccagcgaaggctatcacaagaacgctggctgtaaagcctttgcccttctatctagatatggattgctcaggaaacttgactgtttaaaggtatttttaattacttgagccagcttttaaaattatgccacatttaaaatgaagggtatattttcctatactgtggtttgtccctttatgaatcagatacaagaggataaactttgcatattagtaccatttgtccaatacatttgctttttctttataaaacccaaactcattcattaatcaggtttaatctgcttagtttagggaacaatttggcaattttgtggatttttttttgagattatcgttctcttaaagtgccagtgttttaaatagcgttcttgtaatttcacgcgcttttgtgatggagtgctgttatataattttgacttgggttctttacatttgcgttgttaatgtaatttgaggaggaatactgaacatgagtcctggatgatactaataaactaataattacagaggttttaaatattagttaaatgactttcacttaagaatttaagcttttggtcacactttataatagtgccttatagtataaacaactgaaaggctctttcccattaacaacccttgatgctggggccagtgagatagtgggtaaaaaggcagttggctgccaaccctgacaaccgatggcaaaaggagggaaccagcttccaaaatgctttgaccaaatgctccctccattcatgaacacagttttaaaatgttaaataggctagagggcagtaaaaacaggtttttttatcgagcatccctaatctatacatatgaggagccataatctgaatgttaagtgaaaagcgaggttggtcttaaagattgcacgtgtgttcttaagcctgtagaggacctccgcaggccgtaatggtctcgattaccaacttaagaacaagtgactggcttggaaacttgtactgttgctttagaactaccattgtggacatctgttgttagtaagtgatccatttaaaagtgaactctgcctcaa

SEQ ID NO: 4 - DNA, 2855 bp, Mus musculus
  source 1..2855: mol_type = unassigned DNA
ttgaggcagagttcacttttaaatggatcacttactaacaacagatgtccacaatggtagttctaaagcaacagtacaagtttccaagccagtcacttgttcttaagttggtaatcgagaccattacggcctgcggaggtcctctacaggcttaagaacacacgtgcaatctttaagaccaacctcgcttttcacttaacattcagattatggctcctcatatgtatagattagggatgctcgataaaaaaacctgtttttactgccctctagcctatttaacattttaaaactgtgttcatgaatggagggagcatttggtcaaagcattttggaagctggttccctccttttgccatcggttgtcagggttggcagccaactgcctttttacccactatctcactggccccagcatcaagggttgttaatgggaaagagcctttcagttgtttatactataaggcactattataaagtgtgaccaaaagcttaaattcttaagtgaaagtcatttaactaatatttaaaacctctgtaattattagtttattagtatcatccaggactcatgttcagtattcctcctcaaattacattaacaacgcaaatgtaaagaacccaagtcaaaattatataacagcactccatcacaaaagcgcgtgaaattacaagaacgctatttaaaacactggcactttaagagaacgataatctcaaaaaaaaatccacaaaattgccaaattgttccctaaactaagcagattaaacctgattaatgaatgagtttgggttttataaagaaaaagcaaatgtattggacaaatggtactaatatgcaaagtttatcctcttgtatctgattcataaagggacaaaccacagtataggaaaatatacccttcattttaaatgtggcataattttaaaagctggctcaagtaattaaaaatacctttaaacagtcaagtttcctgagcaatccatatctagatagaagggcaaaggctttacagccagcgttcttgtgatagccttcgctgggactaaggtcaacaaatagtacagcagtcttgtattttaagctcacacttttggggatacattctcaggtcttctttagtaggggaaactgcaaaatataactgtcattacacagtaatggcggttaaaggagagtcctcgtgtaaggattagaaggtacttttctatcagtccttcaaggacagacgttcagattgcttgatcctaatagtcccacggtgtgacagtattgatcactccttgctttgccaagtaggttatataatatctcttatccaactatcacgatttaggagattcttcaactatggatgaaaatgttaccctaccacaatggcagggcatgtggacaaaagctctcttccagctaactagatgaaagataacacactaataatccatgtgacccaaaatgggcaaagcaaaagactagcttccccttgagaagaaaactttcagacctatgaaaaggacaacaatactaataaaaaaaattgtatttacttagaagcattcagaatgtcaacaaaacagccgcaattttttttttgcaattacagagtggtattcagttaacagaacaacaattatcttcgtataagctgcatcagagacaactgaagatgaaaaaaataaaacccaaaaagaaaaccaaaagaaaaaaaaaaaaaaacaaaaaaccaaactactgtccccatatataactaatttgtgctgtgcaccaacaagaacctgctttaaatttccatgccaatttacaacccccagactgtaccaggcaaggttagtggctattgaaaataccaccaggacagggctatctaaagacacattcggtagtgtgttaactatacaaaaaaagacactgtacagtttaaaaacaaatcttacacagccttacatttcaatttttttctttaaaaggagtgagttgtgtacaggggggttaaatgctttatagacaagaaaaaaaaactgcgctagaaccaacttattcatcatcatcatcttcttcttcatcttcgtcttcctcttcttcctcctcttcctcatcctcttcatcctcctcatcatcttcctcttccttctttttcttgctcttttcagccttgaccaccccctttttcgctgcatcaggttttcctttagctctgtaggcagcaatatccttctcatacttctccttcagcttggcagctttcttctcatagggctgcttgtcatctgctgcagtgttgttccacatctctcctagtttctttgcaacatcaccaatggataagccaggatgctcgcctttgattttggggcggtactcagaacagaacaagaagaaggccgaaggaggcctcttgggtgcattggggtccttgaacttctttttggtctcccctttgggggggatgtaggttttcatttctctttcataacgagccttgtcagcctttgccatatcttcaaatttccccttttctttagcagacatggtcttccacctctctgagcacttcttggagaactctgagaagttgacagaagcatccgggtgcttcttcttgtgctcctcccggcaagtttgcacaaagaatgcatatgaggacattttgcctctcggctttttaggatctcctttgcccatgtttagttgattttcctccgcgaggcacagagtcgcccagtgcccgtccggctcgcgcttgccccggcgctgtctctatggagctcaatgtactgcaatggctgtgagagcgggagccagacgcagcctcctcactctctccgctctgtaacattactctccagccagcgcg

SEQ ID NO: 5 - DNA, 2256 bp, Rattus norvegicus
  source 1..2256: mol_type = unassigned DNA
cgagagccggacgggcactgggcgactctgtgcctcgcggaggaaaatcaactaaacatgggcaaaggagatcctaagaagccgagaggcaaaatgtcctcatatgcattctttgtgcaaacctgccgggaggagcacaagaagaagcacccggatgcttctgtcaacttctcagagttctccaagaagtgctcagagaggtggaagaccatgtctgctaaagaaaaggggaaatttgaagatatggcaaaggctgacaaggctcgttatgaaagagaaatgaaaacctacatcccccccaaaggggagaccaaaaagaagttcaaggaccccaatgcccccaagaggcctccttcggccttcttcttgttctgttctgagtaccgcccaaaaatcaaaggcgagcatcctggcttatccattggtgatgttgcgaagaaactaggagagatgtggaacaacactgctgcggatgacaagcagccctatgaaaagaaggccgccaagctgaaggagaagtatgagaaggatattgctgcctacagagctaaaggaaaacctgatgcagcgaaaaagggggtggtcaaggctgagaagagcaagaaaaagaaggaagaggaagacgacgaggaggatgaagaggatgaggaagaggaggaagaggaggaagacgaagatgaagaagaagatgatgatgatgaataagttggttctagcgcagtttttttttcttgtctataaagcatttaacccccctgtacacaactcactccttttaaagaaaaaaattgaaatgtaaggctgtgtaagatttgtttttaaactgtacagtgtctttttttgtatagttaacacactaccgaatgtgtctttagctagccctgtcctggtggtattttcaatagccactaaccttgcctggtacagtctgggggttgtaaattggcatggaaattaaagcaggttcttgttggtgcacagcacaaattagttatatatggggacagtagtttggtttttggtttctttttttttttttttttggttttgttttttttccttttgttttttttttccatcttcagttgtctctgatgcagcttatacgaaggtaattgttgttctgttaactgaataccactctgtaattgcaaaaaaatggcggctgttttgttgacattctgaatgcttctaagtaaatacaattttttttattagtactgttgtccttttcataggtctgaaagttttcttctcaaggggaagctagtcttttgcttttgcccattttgggtcacatggattattagtgtgtatcttcatatagttggaaaaatcttttgtccacacaccctgcatattgtggtaggggtaacattttcatctacagttgaagaattctccaaaattgtgatcagttggataagagatactctacttagcaaagcaaggagtgatcaattctgtcacaccatgggattattagatcaaacagtctgaaagtctgtccttgaaggactaatagaaaagtatgttctgctccttacctgaggactcctttaactgccattactgtgtaatgacagttatattttgcagtttcccctactaaagacctgagaatgtatccccaaaagcgtgagcttaaaatacaagattgctgtactatttgttgaccttagtcccagcgaaggctatcatgagaagctggctgtaatgcctttgcccttctatctaaatacggattgctcaggaaacttgactgtttaaaggtatatttaattagttgagccagcttttaaaattatgccacatttaaaatgaagggtatattttcctatattgtggtttgtccctttataaatcagatacaaggaaagcggataaactttgcatattagtaccagttgtccaagccatttgctttttctttataaagcccgaactcattcattaatcatgtttaatctgcttagtttagggaacaatttggcaattttgtgggttttctttttttctttttcttttttttttttttttgagattatcattctcttaaagtgccagtgttttaaaatagcgttcttgtaattttccgcgcttttgtgatggagtgctgttatatcattttgacttgggttctttacagttgcctttgttctgtaatttgaggaggaatactgaacatgagtcctggatgatactaataaactaataattgcagaggttttaaaaaaaaaaaaaaaaaaaaaaaaa

SEQ ID NO: 6 - DNA, 2256 bp, Rattus norvegicus
  source 1..2256: mol_type = unassigned DNA
tttttttttttttttttttttttttaaaacctctgcaattattagtttattagtatcatccaggactcatgttcagtattcctcctcaaattacagaacaaaggcaactgtaaagaacccaagtcaaaatgatataacagcactccatcacaaaagcgcggaaaattacaagaacgctattttaaaacactggcactttaagagaatgataatctcaaaaaaaaaaaaaaaagaaaaagaaaaaaagaaaacccacaaaattgccaaattgttccctaaactaagcagattaaacatgattaatgaatgagttcgggctttataaagaaaaagcaaatggcttggacaactggtactaatatgcaaagtttatccgctttccttgtatctgatttataaagggacaaaccacaatataggaaaatatacccttcattttaaatgtggcataattttaaaagctggctcaactaattaaatatacctttaaacagtcaagtttcctgagcaatccgtatttagatagaagggcaaaggcattacagccagcttctcatgatagccttcgctgggactaaggtcaacaaatagtacagcaatcttgtattttaagctcacgcttttggggatacattctcaggtctttagtaggggaaactgcaaaatataactgtcattacacagtaatggcagttaaaggagtcctcaggtaaggagcagaacatacttttctattagtccttcaaggacagactttcagactgtttgatctaataatcccatggtgtgacagaattgatcactccttgctttgctaagtagagtatctcttatccaactgatcacaattttggagaattcttcaactgtagatgaaaatgttacccctaccacaatatgcagggtgtgtggacaaaagatttttccaactatatgaagatacacactaataatccatgtgacccaaaatgggcaaaagcaaaagactagcttccccttgagaagaaaactttcagacctatgaaaaggacaacagtactaataaaaaaaattgtatttacttagaagcattcagaatgtcaacaaaacagccgccatttttttgcaattacagagtggtattcagttaacagaacaacaattaccttcgtataagctgcatcagagacaactgaagatggaaaaaaaaaacaaaaggaaaaaaaacaaaaccaaaaaaaaaaaaaaaaagaaaccaaaaaccaaactactgtccccatatataactaatttgtgctgtgcaccaacaagaacctgctttaatttccatgccaatttacaacccccagactgtaccaggcaaggttagtggctattgaaaataccaccaggacagggctagctaaagacacattcggtagtgtgttaactatacaaaaaaagacactgtacagtttaaaaacaaatcttacacagccttacatttcaatttttttctttaaaaggagtgagttgtgtacaggggggttaaatgctttatagacaagaaaaaaaaactgcgctagaaccaacttattcatcatcatcatcttcttcttcatcttcgtcttcctcctcttcctcctcttcctcatcctcttcatcctcctcgtcgtcttcctcttccttctttttcttgctcttctcagccttgaccaccccctttttcgctgcatcaggttttcctttagctctgtaggcagcaatatccttctcatacttctccttcagcttggcggccttcttttcatagggctgcttgtcatccgcagcagtgttgttccacatctctcctagtttcttcgcaacatcaccaatggataagccaggatgctcgcctttgatttttgggcggtactcagaacagaacaagaagaaggccgaaggaggcctcttgggggcattggggtccttgaacttctttttggtctcccctttgggggggatgtaggttttcatttctctttcataacgagccttgtcagcctttgccatatcttcaaatttccccttttctttagcagacatggtcttccacctctctgagcacttcttggagaactctgagaagttgacagaagcatccgggtgcttcttcttgtgctcctcccggcaggtttgcacaaagaatgcatatgaggacattttgcctctcggcttcttaggatctcctttgcccatgtttagttgattttcctccgcgaggcacagagtcgcccagtgcccgtccggctctcg

SEQ ID NO: 7 - DNA, 2323 bp, Macaca fascicularis
  source 1..2323: mol_type = unassigned DNA
aatgttacagagcggagagagtgaggaggctgcgtctggctcccgctctcacagccattgcagtacattgagctccatagagacagcgccggggcaagtgagagccggacgggcactgggcgactctgtgcctcgctgaggaaaaataactaaacatgggcaaaggagatcctaagaagccgagaggcaaaatgtcatcatatgcattttttgtgcaaacttgtcgggaggagcataagaagaagcacccagatgcttcagtcaacttctcagagttttctaagaagtgctcagagaggtggaagaccatgtctgctaaagagaaaggaaaatttgaagatatggcaaaggcggacaaggcccgttacgaaagagaaatgaaaacctatatccctcccaaaggggagacaaaaaagaagttcaaggatcccaatgcacccaagaggcctccttcggccttcttcctgttctgctctgagtatcgcccaaaaatcaaaggagaacatcctggcctgtccattggtgatgttgcgaagaaactgggagagatgtggaataacactgctgcagatgacaagcagccttatgaaaagaaggctgcgaagctgaaggaaaaatacgaaaaggatattgctgcatatcgagctaaaggaaagcctgatgcagcaaaaaagggagttgtcaaggctgaaaaaagcaagaaaaagaaggaagaggaggaagatgaggaagatgaagaggatgaggaggaggaggaagatgaagaagatgaagatgaagaagaagatgatgatgatgaataagttggttctagcgcagttttttttttcttgtctataaagcatttaacccccctgtacacaactcactccttttaaagaaaaaaattgaaatgtaaggctgtgtaagatttgtttttaaactgtacagtgtctttttttgtatagttaacacactaccgaatgtgtctttacatagccctgtcctggtggtattttcaatagccactaaccttgcctggtacagtatgggggttgtaaattggcatggaaatttaaagcaggttcttgttggtgcacagcacaaattagttatatatggggatggtagttttttcatcttcagttgtctctgatgcagcttatacgaaataattgttgttctgttaactgaataccactctgtaattgcaaaaaaaaaaaaaaaagttgcagctgttttgttgacattctgaatgcttctaagtaaatacaattttttttattagtattgttgtccttttcataggtctgaaatttttcttcttgaggggaagctagtcttttgcttttgcccattttgaatcacatgaattattacagtgtttatcctttcatatagttagctaataaaaagcttttgtctacacaccctgcataccataatgggggtaaagttaagttgagatagttttcatccataactgaacatcgaaaatcttgatcagttaagaaatttcacatagcccacttacatttacaaactgaagagtaatcagtctactcaaagcatgggattattagaatcaaacattttgaaagtctgtccttgaaggactaatagaaaagtatgttctaacctttacatgaggactctattctttaactcccattaccatgtaatggcagttatattttgcagttcccacattaaagaagacctgagaatgtatccccaaaagcgtgagcttaaaatacaagattgccatattaaattttttgttgacattagtctcagtgaagactatgaaaatgctggctatagatgtcttttcccatttatctcaatatggactgctcaggaaacgagactttccattacaagtatttttaattaattgggccagcttttaaaatgaagatgccacattcaaaatagggtgtattttcctatattatggtttgcccctttataaatcgaagtagataggaggaaagaagacacttaaactttgcatctcagtatgaattattcaattgatttgaatgatttttctttacaaaacaaactcattagtcattatctgcttagcagtttagggaacaatttggcaattttgtggtttttcgagattatcgttttcttaaagtgccagtattttaaaatagcgttcttgtaattttacacgcttttgtgatggagtgctgttttgttatataattttgacttggattctttccatttgcatttgtttatgtaatttcaggaggaatactgaacatctgagtcctggatgatactaataaactaataattgcagaggttttaaaaaaaaaaaaaaaaa

SEQ ID NO: 8 - DNA, 2323 bp, Macaca fascicularis
  source 1..2323: mol_type = unassigned DNA
tttttttttttttttttaaaacctctgcaattattagtttattagtatcatccaggactcagatgttcagtattcctcctgaaattacataaacaaatgcaaatggaaagaatccaagtcaaaattatataacaaaacagcactccatcacaaaagcgtgtaaaattacaagaacgctattttaaaatactggcactttaagaaaacgataatctcgaaaaaccacaaaattgccaaattgttccctaaactgctaagcagataatgactaatgagtttgttttgtaaagaaaaatcattcaaatcaattgaataattcatactgagatgcaaagtttaagtgtcttctttcctcctatctacttcgatttataaaggggcaaaccataatataggaaaatacaccctattttgaatgtggcatcttcattttaaaagctggcccaattaattaaaaatacttgtaatggaaagtctcgtttcctgagcagtccatattgagataaatgggaaaagacatctatagccagcattttcatagtcttcactgagactaatgtcaacaaaaaatttaatatggcaatcttgtattttaagctcacgcttttggggatacattctcaggtcttctttaatgtgggaactgcaaaatataactgccattacatggtaatgggagttaaagaatagagtcctcatgtaaaggttagaacatacttttctattagtccttcaaggacagactttcaaaatgtttgattctaataatcccatgctttgagtagactgattactcttcagtttgtaaatgtaagtgggctatgtgaaatttcttaactgatcaagattttcgatgttcagttatggatgaaaactatctcaacttaactttacccccattatggtatgcagggtgtgtagacaaaagctttttattagctaactatatgaaaggataaacactgtaataattcatgtgattcaaaatgggcaaaagcaaaagactagcttcccctcaagaagaaaaatttcagacctatgaaaaggacaacaatactaataaaaaaaattgtatttacttagaagcattcagaatgtcaacaaaacagctgcaacttttttttttttttttgcaattacagagtggtattcagttaacagaacaacaattatttcgtataagctgcatcagagacaactgaagatgaaaaaactaccatccccatatataactaatttgtgctgtgcaccaacaagaacctgctttaaatttccatgccaatttacaacccccatactgtaccaggcaaggttagtggctattgaaaataccaccaggacagggctatgtaaagacacattcggtagtgtgttaactatacaaaaaaagacactgtacagtttaaaaacaaatcttacacagccttacatttcaatttttttctttaaaaggagtgagttgtgtacaggggggttaaatgctttatagacaagaaaaaaaaaactgcgctagaaccaacttattcatcatcatcatcttcttcttcatcttcatcttcttcatcttcctcctcctcctcatcctcttcatcttcctcatcttcctcctcttccttctttttcttgcttttttcagccttgacaactcccttttttgctgcatcaggctttcctttagctcgatatgcagcaatatccttttcgtatttttccttcagcttcgcagccttcttttcataaggctgcttgtcatctgcagcagtgttattccacatctctcccagtttcttcgcaacatcaccaatggacaggccaggatgttctcctttgatttttgggcgatactcagagcagaacaggaagaaggccgaaggaggcctcttgggtgcattgggatccttgaacttcttttttgtctcccctttgggagggatataggttttcatttctctttcgtaacgggccttgtccgcctttgccatatcttcaaattttcctttctctttagcagacatggtcttccacctctctgagcacttcttagaaaactctgagaagttgactgaagcatctgggtgcttcttcttatgctcctcccgacaagtttgcacaaaaaatgcatatgatgacattttgcctctcggcttcttaggatctcctttgcccatgtttagttatttttcctcagcgaggcacagagtcgcccagtgcccgtccggctctcacttgccccggcgctgtctctatggagctcaatgtactgcaatggctgtgagagcgggagccagacgcagcctcctcactctctccgctctgtaacatt

SEQ ID NO: 9 - DNA, 4270 bp, Homo sapiens
  source 1..4270: mol_type = unassigned DNA
agtcagaacagaaatacatctcagggccaaaccgataggaaacgaggctgcctcgcggtggcaccgccaccccccaaccgggttccgagcaccggagctggctgctgctccctctttggagcaaagttttatgcaaagagggtgttttttgaaactttcggtgcacgaaaaataactaaacatgggcaaaggagatcctaagaagccgagaggcaaaatgtcatcatatgcattttttgtgcaaacttgtcgggaggagcataagaagaagcacccagatgcttcagtcaacttctcagagttttctaagaagtgctcagagaggtggaagaccatgtctgctaaagagaaaggaaaatttgaagatatggcaaaagcggacaaggcccgttatgaaagagaaatgaaaacctatatccctcccaaaggggagacaaaaaagaagttcaaggatcccaatgcacccaagaggcctccttcggccttcttcctcttctgctctgagtatcgcccaaaaatcaaaggagaacatcctggcctgtccattggtgatgttgcgaagaaactgggagagatgtggaataacactgctgcagatgacaagcagccttatgaaaagaaggctgcgaagctgaaggaaaaatacgaaaaggatattgctgcatatcgagctaaaggaaagcctgatgcagcaaaaaagggagttgtcaaggctgaaaaaagcaagaaaaagaaggaagaggaggaagatgaggaagatgaagaggatgaggaggaggaggaagatgaagaagatgaagatgaagaagaagatgatgatgatgaataagttggttctagcgcagttttttttttcttgtctataaagcatttaacccccctgtacacaactcactccttttaaagaaaaaaattgaaatgtaaggctgtgtaagatttgtttttaaactgtacagtgtctttttttgtatagttaacacactaccgaatgtgtctttagatagccctgtcctggtggtattttcaatagccactaaccttgcctggtacagtatgggggttgtaaattggcatggaaatttaaagcaggttcttgttggtgcacagcacaaattagttatatatggggatggtagttttttcatcttcagttgtctctgatgcagcttatacgaaataattgttgttctgttaactgaataccactctgtaattgcaaaaaaaaaaaaaaagttgcagctgttttgttgacattctgaatgcttctaagtaaatacaattttttttattagtattgttgtccttttcataggtctgaaatttttcttcttgaggggaagctagtcttttgcttttgcccattttgaatcacatgaattattacagtgtttatcctttcatatagttagctaataaaaagcttttgtctacacaccctgcatatcataatgggggtaaagttaagttgagatagttttcatccataactgaacatccaaaatcttgatcagttaagaaatttcacatagcccacttacatttacaaactgaagagtaatcaatctactcaaagcatgggattattagaatcaaacattttgaaagtctgtccttgaaggactaatagaaaagtatgttctaacctttacatgaggactctattctttaactcccattaccatgtaatggcagttatattttgcagttcccacattaaagaagacctgagaatgtatccccaaaagcgtgagcttaaaatacaagactgccatattaaattttttgttgacattagtctcagtgaagactatgaaaatgctggctatagatgtcttttcccatttatctaaatatggactgctcaggaaacgagactttccattacaagtatttttaattaattgggccagcttttcaaacaaagatgccacattcaaaatagggtatattttcctatattacggtttgcccctttataaatccaagtagataggaagaaagaagacaaactttgcatctcagtatgaattattcaatttatttgaatgatttttctttacaaaacaaactcattcattagtcatgtttatctgcttaggagtttagggaacaatttggcaattttgtggttttcgagattatcgttttcttaaagtgccagtattttaaaatagcgttcttgtaattttacacgcttttgtgatggagtgctgttttgttatataatttagacttggattctttccatttgcatttgtttatgtaatttcaggaggaatactgaacatctgagtcctggatgatactaataaactaataattgcagaggttttaaatactagttaaatggctttcacttaagaacttaagattttgttacatatttttaaatcttgtttctaataatacctcttagcagtaccttttaaataagtataagggatggcaaagtttttccctttaaaaatactcactttatgcttataaataggttaatgggctgataaaaggttttgtcaaacattgcaagtattcggtgctatatataaaggaggaaaaactagttttactttcagaatgatttaaacaagatttttaaaaacaagatacatgcaagcgaacagcagggttagtgataggctgcaattgtgtcgaacatcagattttttgttaagaggagcaaatgactcaatctgatttagatggaagtttctactgtatagaaatcaccattaatcaccaacattaataattctgatccatttaaaatgaattctggctcaaggagaatttgtaactttagtaggtacgtcatgacaactaccatttttttaagatgttgagaatgggaacagtttttttagggtttattcttgaccacagatcttaagaaaatggacaaaacccctcttcaatctgaagattagtatggtttggtgttctaacagtatcccctagaagttggatgtctaaaactcaagtaaatggaagtgggaggcaatttagataagtgtaaagccttgtaactgaagatgattttttttagaaagtgtatagaaactattttaatgccaagatagttacagtgctgtggggtttaaagactttgttgacatcaagaaaagactaaatctataattaattgggccaacttttaaaatgaagatgctttttaaaactaatgaactaagatgtataaatcttagtttttttgtattttaaagataggcatatggcatattgattaacgagtcaaatttcctaactttgctgtgcaaaggttgagagctattgctgattagttaccacagttctgatgatcgtcccatcacagtgttgttaatgtttgctgtatttattaattttcttaaagtgaaatctgaaaaatgaaatttgtgtgtcctgtgtacccgaggggtaatgattaaatgataaagataagaaaagcgcccatgtaacacaaactgccattcaacaggtatttcccttactacctaaggaattgtaaccattgctcagacattgtaggatttaactatgttgaaaactacaggagaggccgggcgcagtggctcacgcctgtaatcccagcactttgggaggccaaggcgggcagatcacgaggtcaggagattgagaccatcctggctaacgtggtgaaaccccgcctctactaaaaatacaaaaaattagccaagcgtggtgctgggcgcctgtagtcccagtaactcaggaggctgaggcaggagaatggcgtgaacccgggaggcggaggttgcagtgagccgagattgtgccactgcactccagcctgggtgacagagcaagactccatctcaaaaaaaaaaaaaaaacacaggagagacaactggtttttgaatgaaatacatgggtactgccttgcttgacatcacatagtccttgatgaaagttcacatttaggtctgcttggtacaatacgcctcctaaaaaggtccttgatgaaagttcacatttaggtctgcttggtacaacacgcctcctgaaagggtctgatagctttcagtagcagtaagacacttgcatgtgatggtaaggtatctgcaaatttgcacacaccgtacacagcttaagtcttagaattaacttgctaaaatgtgagcctttggtaattaggctgttttattagggagtgtgataatatttgaatttcttttcatatttgtgctttgtgtcattttcaaatgacccttgaaatgtattttaaaagtagataaaagccagaaagtga

SEQ ID NO: 10 - DNA, 4270 bp, Homo sapiens
  source 1..4270: mol_type = unassigned DNA
tcactttctggcttttatctacttttaaaatacatttcaagggtcatttgaaaatgacacaaagcacaaatatgaaaagaaattcaaatattatcacactccctaataaaacagcctaattaccaaaggctcacattttagcaagttaattctaagacttaagctgtgtacggtgtgtgcaaatttgcagataccttaccatcacatgcaagtgtcttactgctactgaaagctatcagaccctttcaggaggcgtgttgtaccaagcagacctaaatgtgaactttcatcaaggacctttttaggaggcgtattgtaccaagcagacctaaatgtgaactttcatcaaggactatgtgatgtcaagcaaggcagtacccatgtatttcattcaaaaaccagttgtctctcctgtgttttttttttttttttgagatggagtcttgctctgtcacccaggctggagtgcagtggcacaatctcggctcactgcaacctccgcctcccgggttcacgccattctcctgcctcagcctcctgagttactgggactacaggcgcccagcaccacgcttggctaattttttgtatttttagtagaggcggggtttcaccacgttagccaggatggtctcaatctcctgacctcgtgatctgcccgccttggcctcccaaagtgctgggattacaggcgtgagccactgcgcccggcctctcctgtagttttcaacatagttaaatcctacaatgtctgagcaatggttacaattccttaggtagtaagggaaatacctgttgaatggcagtttgtgttacatgggcgcttttcttatctttatcatttaatcattacccctcgggtacacaggacacacaaatttcatttttcagatttcactttaagaaaattaataaatacagcaaacattaacaacactgtgatgggacgatcatcagaactgtggtaactaatcagcaatagctctcaacctttgcacagcaaagttaggaaatttgactcgttaatcaatatgccatatgcctatctttaaaatacaaaaaaactaagatttatacatcttagttcattagttttaaaaagcatcttcattttaaaagttggcccaattaattatagatttagtcttttcttgatgtcaacaaagtctttaaaccccacagcactgtaactatcttggcattaaaatagtttctatacactttctaaaaaaaatcatcttcagttacaaggctttacacttatctaaattgcctcccacttccatttacttgagttttagacatccaacttctaggggatactgttagaacaccaaaccatactaatcttcagattgaagaggggttttgtccattttcttaagatctgtggtcaagaataaaccctaaaaaaactgttcccattctcaacatcttaaaaaaatggtagttgtcatgacgtacctactaaagttacaaattctccttgagccagaattcattttaaatggatcagaattattaatgttggtgattaatggtgatttctatacagtagaaacttccatctaaatcagattgagtcatttgctcctcttaacaaaaaatctgatgttcgacacaattgcagcctatcactaaccctgctgttcgcttgcatgtatcttgtttttaaaaatcttgtttaaatcattctgaaagtaaaactagtttttcctcctttatatatagcaccgaatacttgcaatgtttgacaaaaccttttatcagcccattaacctatttataagcataaagtgagtatttttaaagggaaaaactttgccatcccttatacttatttaaaaggtactgctaagaggtattattagaaacaagatttaaaaatatgtaacaaaatcttaagttcttaagtgaaagccatttaactagtatttaaaacctctgcaattattagtttattagtatcatccaggactcagatgttcagtattcctcctgaaattacataaacaaatgcaaatggaaagaatccaagtctaaattatataacaaaacagcactccatcacaaaagcgtgtaaaattacaagaacgctattttaaaatactggcactttaagaaaacgataatctcgaaaaccacaaaattgccaaattgttccctaaactcctaagcagataaacatgactaatgaatgagtttgttttgtaaagaaaaatcattcaaataaattgaataattcatactgagatgcaaagtttgtcttctttcttcctatctacttggatttataaaggggcaaaccgtaatataggaaaatataccctattttgaatgtggcatctttgtttgaaaagctggcccaattaattaaaaatacttgtaatggaaagtctcgtttcctgagcagtccatatttagataaatgggaaaagacatctatagccagcattttcatagtcttcactgagactaatgtcaacaaaaaatttaatatggcagtcttgtattttaagctcacgcttttggggatacattctcaggtcttctttaatgtgggaactgcaaaatataactgccattacatggtaatgggagttaaagaatagagtcctcatgtaaaggttagaacatacttttctattagtccttcaaggacagactttcaaaatgtttgattctaataatcccatgctttgagtagattgattactcttcagtttgtaaatgtaagtgggctatgtgaaatttcttaactgatcaagattttggatgttcagttatggatgaaaactatctcaacttaactttacccccattatgatatgcagggtgtgtagacaaaagctttttattagctaactatatgaaaggataaacactgtaataattcatgtgattcaaaatgggcaaaagcaaaagactagcttcccctcaagaagaaaaatttcagacctatgaaaaggacaacaatactaataaaaaaaattgtatttacttagaagcattcagaatgtcaacaaaacagctgcaactttttttttttttttgcaattacagagtggtattcagttaacagaacaacaattatttcgtataagctgcatcagagacaactgaagatgaaaaaactaccatccccatatataactaatttgtgctgtgcaccaacaagaacctgctttaaatttccatgccaatttacaacccccatactgtaccaggcaaggttagtggctattgaaaataccaccaggacagggctatctaaagacacattcggtagtgtgttaactatacaaaaaaagacactgtacagtttaaaaacaaatcttacacagccttacatttcaatttttttctttaaaaggagtgagttgtgtacaggggggttaaatgctttatagacaagaaaaaaaaaactgcgctagaaccaacttattcatcatcatcatcttcttcttcatcttcatcttcttcatcttcctcctcctcctcatcctcttcatcttcctcatcttcctcctcttccttctttttcttgcttttttcagccttgacaactcccttttttgctgcatcaggctttcctttagctcgatatgcagcaatatccttttcgtatttttccttcagcttcgcagccttcttttcataaggctgcttgtcatctgcagcagtgttattccacatctctcccagtttcttcgcaacatcaccaatggacaggccaggatgttctcctttgatttttgggcgatactcagagcagaagaggaagaaggccgaaggaggcctcttgggtgcattgggatccttgaacttcttttttgtctcccctttgggagggatataggttttcatttctctttcataacgggccttgtccgcttttgccatatcttcaaattttcctttctctttagcagacatggtcttccacctctctgagcacttcttagaaaactctgagaagttgactgaagcatctgggtgcttcttcttatgctcctcccgacaagtttgcacaaaaaatgcatatgatgacattttgcctctcggcttcttaggatctcctttgcccatgtttagttatttttcgtgcaccgaaagtttcaaaaaacaccctctttgcataaaactttgctccaaagagggagcagcagccagctccggtgctcggaacccggttggggggtggcggtgccaccgcgaggcagcctcgtttcctatcggtttggccctgagatgtatttctgttctgact

SEQ ID NO: 11 - DNA, 5030 bp, Homo sapiens
  source 1..5030: mol_type = unassigned DNA
tttctgcggagggattacgctgacgaaagagacctgcttgcgcgtcgctgttccgtggtccgcgcgagcgtggtcgggagccgctggttcctggggtgacccgcggaggtgggagagggaagggcttccgaagccggcgggggtgccatggaccctctccgccggcgcggccttcacagctgggccgcgccgggcatccgtagtccgctctcccaaagcctcggtggagctgaagctgccacagagtgcatgttcacaaagggtcatcacacacggagctgcccctccctgtctccctagagcccatcttcgaggccaggggcttttctaccaggattctggggtgtttctcctcctttcctccctcccagatcttctcacggtaaggggagcagcgaaagcgcagggactttgcattccacgacccgttctgactagtcaacagccgatctgtccctgctgctctaattccagctgccctgccttgttttaacttcagagaaagggggagttctcatttgataagtttaagcctttgctttcgtaggaaggtcatgtggcttaagggacatcgtgaccgcgtatgctatttctgcctgtgcattctaaatcttgggggcagcatattccagaagtccttttggtcgattggttctgtgtcctaggataacaatttgtagtttctgaccatttctttacagaaaaaccacaattggtattttggactgcggggttttttagtggtctcaaactaaatgattatattctggaataatgctgacaatttggatagggtggtgtggaggaaacaagtctcgtgtagaagaaattatttagtaaaaaggattttagtttttggtacttctgaatgcaaatggccaaggaatccagcagtttgttggggtttctccagacaaaaataggctgaaaaataactaaacatgggcaaaggagatcctaagaagccgagaggcaaaatgtcatcatatgcattttttgtgcaaacttgtcgggaggagcataagaagaagcacccagatgcttcagtcaacttctcagagttttctaagaagtgctcagagaggtggaagaccatgtctgctaaagagaaaggaaaatttgaagatatggcaaaagcggacaaggcccgttatgaaagagaaatgaaaacctatatccctcccaaaggggagacaaaaaagaagttcaaggatcccaatgcacccaagaggcctccttcggccttcttcctcttctgctctgagtatcgcccaaaaatcaaaggagaacatcctggcctgtccattggtgatgttgcgaagaaactgggagagatgtggaataacactgctgcagatgacaagcagccttatgaaaagaaggctgcgaagctgaaggaaaaatacgaaaaggatattgctgcatatcgagctaaaggaaagcctgatgcagcaaaaaagggagttgtcaaggctgaaaaaagcaagaaaaagaaggaagaggaggaagatgaggaagatgaagaggatgaggaggaggaggaagatgaagaagatgaagatgaagaagaagatgatgatgatgaataagttggttctagcgcagttttttttttcttgtctataaagcatttaacccccctgtacacaactcactccttttaaagaaaaaaattgaaatgtaaggctgtgtaagatttgtttttaaactgtacagtgtctttttttgtatagttaacacactaccgaatgtgtctttagatagccctgtcctggtggtattttcaatagccactaaccttgcctggtacagtatgggggttgtaaattggcatggaaatttaaagcaggttcttgttggtgcacagcacaaattagttatatatggggatggtagttttttcatcttcagttgtctctgatgcagcttatacgaaataattgttgttctgttaactgaataccactctgtaattgcaaaaaaaaaaaaaaagttgcagctgttttgttgacattctgaatgcttctaagtaaatacaattttttttattagtattgttgtccttttcataggtctgaaatttttcttcttgaggggaagctagtcttttgcttttgcccattttgaatcacatgaattattacagtgtttatcctttcatatagttagctaataaaaagcttttgtctacacaccctgcatatcataatgggggtaaagttaagttgagatagttttcatccataactgaacatccaaaatcttgatcagttaagaaatttcacatagcccacttacatttacaaactgaagagtaatcaatctactcaaagcatgggattattagaatcaaacattttgaaagtctgtccttgaaggactaatagaaaagtatgttctaacctttacatgaggactctattctttaactcccattaccatgtaatggcagttatattttgcagttcccacattaaagaagacctgagaatgtatccccaaaagcgtgagcttaaaatacaagactgccatattaaattttttgttgacattagtctcagtgaagactatgaaaatgctggctatagatgtcttttcccatttatctaaatatggactgctcaggaaacgagactttccattacaagtatttttaattaattgggccagcttttcaaacaaagatgccacattcaaaatagggtatattttcctatattacggtttgcccctttataaatccaagtagataggaagaaagaagacaaactttgcatctcagtatgaattattcaatttatttgaatgatttttctttacaaaacaaactcattcattagtcatgtttatctgcttaggagtttagggaacaatttggcaattttgtggttttcgagattatcgttttcttaaagtgccagtattttaaaatagcgttcttgtaattttacacgcttttgtgatggagtgctgttttgttatataatttagacttggattctttccatttgcatttgtttatgtaatttcaggaggaatactgaacatctgagtcctggatgatactaataaactaataattgcagaggttttaaatactagttaaatggctttcacttaagaacttaagattttgttacatatttttaaatcttgtttctaataatacctcttagcagtaccttttaaataagtataagggatggcaaagtttttccctttaaaaatactcactttatgcttataaataggttaatgggctgataaaaggttttgtcaaacattgcaagtattcggtgctatatataaaggaggaaaaactagttttactttcagaatgatttaaacaagatttttaaaaacaagatacatgcaagcgaacagcagggttagtgataggctgcaattgtgtcgaacatcagattttttgttaagaggagcaaatgactcaatctgatttagatggaagtttctactgtatagaaatcaccattaatcaccaacattaataattctgatccatttaaaatgaattctggctcaaggagaatttgtaactttagtaggtacgtcatgacaactaccatttttttaagatgttgagaatgggaacagtttttttagggtttattcttgaccacagatcttaagaaaatggacaaaacccctcttcaatctgaagattagtatggtttggtgttctaacagtatcccctagaagttggatgtctaaaactcaagtaaatggaagtgggaggcaatttagataagtgtaaagccttgtaactgaagatgattttttttagaaagtgtatagaaactattttaatgccaagatagttacagtgctgtggggtttaaagactttgttgacatcaagaaaagactaaatctataattaattgggccaacttttaaaatgaagatgctttttaaaactaatgaactaagatgtataaatcttagtttttttgtattttaaagataggcatatggcatattgattaacgagtcaaatttcctaactttgctgtgcaaaggttgagagctattgctgattagttaccacagttctgatgatcgtcccatcacagtgttgttaatgtttgctgtatttattaattttcttaaagtgaaatctgaaaaatgaaatttgtgtgtcctgtgtacccgaggggtaatgattaaatgataaagataagaaaagcgcccatgtaacacaaactgccattcaacaggtatttcccttactacctaaggaattgtaaccattgctcagacattgtaggatttaactatgttgaaaactacaggagaggccgggcgcagtggctcacgcctgtaatcccagcactttgggaggccaaggcgggcagatcacgaggtcaggagattgagaccatcctggctaacgtggtgaaaccccgcctctactaaaaatacaaaaaattagccaagcgtggtgctgggcgcctgtagtcccagtaactcaggaggctgaggcaggagaatggcgtgaacccgggaggcggaggttgcagtgagccgagattgtgccactgcactccagcctgggtgacagagcaagactccatctcaaaaaaaaaaaaaaaacacaggagagacaactggtttttgaatgaaatacatgggtactgccttgcttgacatcacatagtccttgatgaaagttcacatttaggtctgcttggtacaatacgcctcctaaaaaggtccttgatgaaagttcacatttaggtctgcttggtacaacacgcctcctgaaagggtctgatagctttcagtagcagtaagacacttgcatgtgatggtaaggtatctgcaaatttgcacacaccgtacacagcttaagtcttagaattaacttgctaaaatgtgagcctttggtaattaggctgttttattagggagtgtgataatatttgaatttcttttcatatttgtgctttgtgtcattttcaaatgacccttgaaatgtattttaaaagtagataaaagccagaaagtga

SEQ ID NO: 12 - DNA, 5030 bp, Homo sapiens
  source 1..5030: mol_type = unassigned DNA
tcactttctggcttttatctacttttaaaatacatttcaagggtcatttgaaaatgacacaaagcacaaatatgaaaagaaattcaaatattatcacactccctaataaaacagcctaattaccaaaggctcacattttagcaagttaattctaagacttaagctgtgtacggtgtgtgcaaatttgcagataccttaccatcacatgcaagtgtcttactgctactgaaagctatcagaccctttcaggaggcgtgttgtaccaagcagacctaaatgtgaactttcatcaaggacctttttaggaggcgtattgtaccaagcagacctaaatgtgaactttcatcaaggactatgtgatgtcaagcaaggcagtacccatgtatttcattcaaaaaccagttgtctctcctgtgttttttttttttttttgagatggagtcttgctctgtcacccaggctggagtgcagtggcacaatctcggctcactgcaacctccgcctcccgggttcacgccattctcctgcctcagcctcctgagttactgggactacaggcgcccagcaccacgcttggctaattttttgtatttttagtagaggcggggtttcaccacgttagccaggatggtctcaatctcctgacctcgtgatctgcccgccttggcctcccaaagtgctgggattacaggcgtgagccactgcgcccggcctctcctgtagttttcaacatagttaaatcctacaatgtctgagcaatggttacaattccttaggtagtaagggaaatacctgttgaatggcagtttgtgttacatgggcgcttttcttatctttatcatttaatcattacccctcgggtacacaggacacacaaatttcatttttcagatttcactttaagaaaattaataaatacagcaaacattaacaacactgtgatgggacgatcatcagaactgtggtaactaatcagcaatagctctcaacctttgcacagcaaagttaggaaatttgactcgttaatcaatatgccatatgcctatctttaaaatacaaaaaaactaagatttatacatcttagttcattagttttaaaaagcatcttcattttaaaagttggcccaattaattatagatttagtcttttcttgatgtcaacaaagtctttaaaccccacagcactgtaactatcttggcattaaaatagtttctatacactttctaaaaaaaatcatcttcagttacaaggctttacacttatctaaattgcctcccacttccatttacttgagttttagacatccaacttctaggggatactgttagaacaccaaaccatactaatcttcagattgaagaggggttttgtccattttcttaagatctgtggtcaagaataaaccctaaaaaaactgttcccattctcaacatcttaaaaaaatggtagttgtcatgacgtacctactaaagttacaaattctccttgagccagaattcattttaaatggatcagaattattaatgttggtgattaatggtgatttctatacagtagaaacttccatctaaatcagattgagtcatttgctcctcttaacaaaaaatctgatgttcgacacaattgcagcctatcactaaccctgctgttcgcttgcatgtatcttgtttttaaaaatcttgtttaaatcattctgaaagtaaaactagtttttcctcctttatatatagcaccgaatacttgcaatgtttgacaaaaccttttatcagcccattaacctatttataagcataaagtgagtatttttaaagggaaaaactttgccatcccttatacttatttaaaaggtactgctaagaggtattattagaaacaagatttaaaaatatgtaacaaaatcttaagttcttaagtgaaagccatttaactagtatttaaaacctctgcaattattagtttattagtatcatccaggactcagatgttcagtattcctcctgaaattacataaacaaatgcaaatggaaagaatccaagtctaaattatataacaaaacagcactccatcacaaaagcgtgtaaaattacaagaacgctattttaaaatactggcactttaagaaaacgataatctcgaaaaccacaaaattgccaaattgttccctaaactcctaagcagataaacatgactaatgaatgagtttgttttgtaaagaaaaatcattcaaataaattgaataattcatactgagatgcaaagtttgtcttctttcttcctatctacttggatttataaaggggcaaaccgtaatataggaaaatataccctattttgaatgtggcatctttgtttgaaaagctggcccaattaattaaaaatacttgtaatggaaagtctcgtttcctgagcagtccatatttagataaatgggaaaagacatctatagccagcattttcatagtcttcactgagactaatgtcaacaaaaaatttaatatggcagtcttgtattttaagctcacgcttttggggatacattctcaggtcttctttaatgtgggaactgcaaaatataactgccattacatggtaatgggagttaaagaatagagtcctcatgtaaaggttagaacatacttttctattagtccttcaaggacagactttcaaaatgtttgattctaataatcccatgctttgagtagattgattactcttcagtttgtaaatgtaagtgggctatgtgaaatttcttaactgatcaagattttggatgttcagttatggatgaaaactatctcaacttaactttacccccattatgatatgcagggtgtgtagacaaaagctttttattagctaactatatgaaaggataaacactgtaataattcatgtgattcaaaatgggcaaaagcaaaagactagcttcccctcaagaagaaaaatttcagacctatgaaaaggacaacaatactaataaaaaaaattgtatttacttagaagcattcagaatgtcaacaaaacagctgcaactttttttttttttttgcaattacagagtggtattcagttaacagaacaacaattatttcgtataagctgcatcagagacaactgaagatgaaaaaactaccatccccatatataactaatttgtgctgtgcaccaacaagaacctgctttaaatttccatgccaatttacaacccccatactgtaccaggcaaggttagtggctattgaaaataccaccaggacagggctatctaaagacacattcggtagtgtgttaactatacaaaaaaagacactgtacagtttaaaaacaaatcttacacagccttacatttcaatttttttctttaaaaggagtgagttgtgtacaggggggttaaatgctttatagacaagaaaaaaaaaactgcgctagaaccaacttattcatcatcatcatcttcttcttcatcttcatcttcttcatcttcctcctcctcctcatcctcttcatcttcctcatcttcctcctcttccttctttttcttgcttttttcagccttgacaactcccttttttgctgcatcaggctttcctttagctcgatatgcagcaatatccttttcgtatttttccttcagcttcgcagccttcttttcataaggctgcttgtcatctgcagcagtgttattccacatctctcccagtttcttcgcaacatcaccaatggacaggccaggatgttctcctttgatttttgggcgatactcagagcagaagaggaagaaggccgaaggaggcctcttgggtgcattgggatccttgaacttcttttttgtctcccctttgggagggatataggttttcatttctctttcataacgggccttgtccgcttttgccatatcttcaaattttcctttctctttagcagacatggtcttccacctctctgagcacttcttagaaaactctgagaagttgactgaagcatctgggtgcttcttcttatgctcctcccgacaagtttgcacaaaaaatgcatatgatgacattttgcctctcggcttcttaggatctcctttgcccatgtttagttatttttcagcctatttttgtctggagaaaccccaacaaactgctggattccttggccatttgcattcagaagtaccaaaaactaaaatcctttttactaaataatttcttctacacgagacttgtttcctccacaccaccctatccaaattgtcagcattattccagaatataatcatttagtttgagaccactaaaaaaccccgcagtccaaaataccaattgtggtttttctgtaaagaaatggtcagaaactacaaattgttatcctaggacacagaaccaatcgaccaaaaggacttctggaatatgctgcccccaagatttagaatgcacaggcagaaatagcatacgcggtcacgatgtcccttaagccacatgaccttcctacgaaagcaaaggcttaaacttatcaaatgagaactccccctttctctgaagttaaaacaaggcagggcagctggaattagagcagcagggacagatcggctgttgactagtcagaacgggtcgtggaatgcaaagtccctgcgctttcgctgctccccttaccgtgagaagatctgggagggaggaaaggaggagaaacaccccagaatcctggtagaaaagcccctggcctcgaagatgggctctagggagacagggaggggcagctccgtgtgtgatgaccctttgtgaacatgcactctgtggcagcttcagctccaccgaggctttgggagagcggactacggatgcccggcgcggcccagctgtgaaggccgcgccggcggagagggtccatggcacccccgccggcttcggaagcccttccctctcccacctccgcgggtcaccccaggaaccagcggctcccgaccacgctcgcgcggaccacggaacagcgacgcgcaagcaggtctctttcgtcagcgtaatccctccgcagaaa

SEQ ID NO: 13 - protein, 16 aa, unidentified
  REGION 1..16: note = Description of Unknown: RFGF peptide
AAVALLPAVLLALLAP

SEQ ID NO: 14 - protein, 11 aa, unidentified
  REGION 1..11: note = Description of Unknown: RFGF analogue peptide
AALLPVLLAAP

SEQ ID NO: 15 - protein, 13 aa, Human immunodeficiency virus
GRKKRRQRRRPPQ

SEQ ID NO: 16 - protein, 16 aa, Drosophila sp.
RQIKIWFQNRRMKWKK

SEQ ID NO: 17 - RNA, 21 nt, synthetic construct
  misc_feature 1..21: note = Description of Artificial Sequence: Synthetic oligonucleotide
  source 1..21: mol_type = other RNA
gtgcaaacttgtcgggaggaa

SEQ ID NO: 18 - RNA, 21 nt, synthetic construct
  misc_feature 1..21: note = Description of Artificial Sequence: Synthetic oligonucleotide
  source 1..21: mol_type = other RNA
tttttaaactgtacagtgtct

SEQ ID NO: 19 - RNA, 21 nt, synthetic construct
  misc_feature 1..21: note = Description of Artificial Sequence: Synthetic oligonucleotide
  source 1..21: mol_type = other RNA
tttgtatagttaacacactaa

SEQ ID NO: 20 - RNA, 21 nt, synthetic construct
  misc_feature 1..21: note = Description of Artificial Sequence: Synthetic oligonucleotide
  source 1..21: mol_type = other RNA
ttgtatagttaacacactaca

SEQ ID NO: 21 - RNA, 21 nt, synthetic construct
  misc_feature 1..21: note = Description of Artificial Sequence: Synthetic oligonucleotide
  source 1..21: mol_type = other RNA
tgtatagttaacacactacca

SEQ ID NO: 22 - RNA, 21 nt, synthetic construct
  misc_feature 1..21: note = Description of Artificial Sequence: Synthetic oligonucleotide
  source 1..21: mol_type = other RNA
gtatagttaacacactaccga

SEQ ID NO: 23 - RNA, 21 nt, synthetic construct
  misc_feature 1..21: note = Description of Artificial Sequence: Synthetic oligonucleotide
  source 1..21: mol_type = other RNA
tatagttaacacactaccgaa

SEQ ID NO: 24 - RNA, 21 nt, synthetic construct
  misc_feature 1..21: note = Description of Artificial Sequence: Synthetic oligonucleotide
  source 1..21: mol_type = other RNA
atagttaacacactaccgaat

SEQ ID NO: 25 - RNA, 21 nt, synthetic construct
  misc_feature 1..21: note = Description of Artificial Sequence: Synthetic oligonucleotide
  source 1..21: mol_type = other RNA
tagttaacacactaccgaata

SEQ ID NO: 26 - RNA, 21 nt, synthetic construct
  misc_feature 1..21: note = Description of Artificial Sequence: Synthetic oligonucleotide
  source 1..21: mol_type = other RNA
agttaacacactaccgaatgt

SEQ ID NO: 27 - RNA, 21 nt, synthetic construct
  misc_feature 1..21: note = Description of Artificial Sequence: Synthetic oligonucleotide
  source 1..21: mol_type = other RNA
gttaacacactaccgaatgta

SEQ ID NO: 28 - RNA, 21 nt, synthetic construct
  misc_feature 1..21: note = Description of Artificial Sequence: Synthetic oligonucleotide
  source 1..21: mol_type = other RNA
ttaacacactaccgaatgtgt

SEQ ID NO: 29 - RNA, 21 nt, synthetic construct
  misc_feature 1..21: note = Description of Artificial Sequence: Synthetic oligonucleotide
  source 1..21: mol_type = other RNA
tctctgatgcagcttatacga

SEQ ID NO: 30 - RNA, 21 nt, synthetic construct
  misc_feature 1..21: note = Description of Artificial Sequence: Synthetic oligonucleotide
  source 1..21: mol_type = other RNA
ctctgatgcagcttatacgaa

SEQ ID NO: 31 - RNA, 21 nt, synthetic construct
  misc_feature 1..21: note = Description of Artificial Sequence: Synthetic oligonucleotide
  source 1..21: mol_type = other RNA
tctgatgcagcttatacgaaa

SEQ ID NO: 32 - RNA, 21 nt, synthetic construct
  misc_feature 1..21: note = Description of Artificial Sequence: Synthetic oligonucleotide
  source 1..21: mol_type = other RNA
ctgatgcagcttatacgaaat

SEQ ID NO: 33 - RNA, 21 nt, synthetic construct
  misc_feature 1..21: note = Description of Artificial Sequence: Synthetic oligonucleotide
  source 1..21: mol_type = other RNA
tgatgcagcttatacgaaata

SEQ ID NO: 34 - RNA, 21 nt, synthetic construct
  misc_feature 1..21: note = Description of Artificial Sequence: Synthetic oligonucleotide
  source 1..21: mol_type = other RNA
tacgaaataattgttgttcta

SEQ ID NO: 35 - RNA, 21 nt, synthetic construct
  misc_feature 1..21: note = Description of Artificial Sequence: Synthetic oligonucleotide
  source 1..21: mol_type = other RNA
ttgttgtccttttcataggta

SEQ ID NO: 36 - RNA, 21 nt, synthetic construct
  misc_feature 1..21: note = Description of Artificial Sequence: Synthetic oligonucleotide
  source 1..21: mol_type = other RNA
gggaagctagtcttttgcttt

SEQ ID NO: 37 - RNA, 21 nt, synthetic construct
  misc_feature 1..21: note = Description of Artificial Sequence: Synthetic oligonucleotide
  source 1..21: mol_type = other RNA
atcctttcatatagttagcta

SEQ ID NO: 38 - RNA, 21 nt, synthetic construct
  misc_feature 1..21: note = Description of Artificial Sequence: Synthetic oligonucleotide
  source 1..21: mol_type = other RNA
tcctttcatatagttagctaa

SEQ ID NO: 39 - RNA, 21 nt, synthetic construct
  misc_feature 1..21: note = Description of Artificial Sequence: Synthetic oligonucleotide
  source 1..21: mol_type = other RNA
aaaaagcttttgtctacacaa

SEQ ID NO: 40 - RNA, 21 nt, synthetic construct
  misc_feature 1..21: note = Description of Artificial Sequence: Synthetic oligonucleotide
  source 1..21: mol_type = other RNA
tttgtctacacaccctgcata

SEQ ID NO: 41 - RNA, 21 nt, synthetic construct
  misc_feature 1..21: note = Description of Artificial Sequence: Synthetic oligonucleotide
  source 1..21: mol_type = other RNA
ttgtctacacaccctgcatat

SEQ ID NO: 42 - RNA, 21 nt, synthetic construct
  misc_feature 1..21: note = Description of Artificial Sequence: Synthetic oligonucleotide
  source 1..21: mol_type = other RNA
aagttaagttgagatagtttt

SEQ ID NO: 43 - RNA, 21 nt, synthetic construct
  misc_feature 1..21: note = Description of Artificial Sequence: Synthetic oligonucleotide
  source 1..21: mol_type = other RNA
gttaagttgagatagttttca

SEQ ID NO: 44 - RNA, 21 nt, synthetic construct
  misc_feature 1..21: note = Description of Artificial Sequence: Synthetic oligonucleotide
  source 1..21: mol_type = other RNA
aagttgagatagttttcatca

SEQ ID NO: 45 - RNA, 21 nt, synthetic construct
  misc_feature 1..21: note = Description of Artificial Sequence: Synthetic oligonucleotide
  source 1..21: mol_type = other RNA
agatagttttcatccataact

SEQ ID NO: 46 - RNA, 21 nt, synthetic construct
  misc_feature 1..21: note = Description of Artificial Sequence: Synthetic oligonucleotide
  source 1..21: mol_type = other RNA
gatagttttcatccataacta

SEQ ID NO: 47 - RNA, 21 nt, synthetic construct
  misc_feature 1..21: note = Description of Artificial Sequence: Synthetic oligonucleotide
  source 1..21: mol_type = other RNA
atagttttcatccataactga

SEQ ID NO: 48 - RNA, 21 nt, synthetic construct
  misc_feature 1..21: note = Description of Artificial Sequence: Synthetic oligonucleotide
  source 1..21: mol_type = other RNA
aaaatcttgatcagttaagaa

SEQ ID NO: 49 - RNA, 21 nt, synthetic construct
  misc_feature 1..21: note = Description of Artificial Sequence: Synthetic oligonucleotide
  source 1..21: mol_type = other RNA
taagaaatttcacatagccca

SEQ ID NO: 50 - RNA, 21 nt, synthetic construct
  misc_feature 1..21: note = Description of Artificial Sequence: Synthetic oligonucleotide
  source 1..21: mol_type = other RNA
ttcacatagcccacttacatt

SEQ ID NO: 51 - RNA, 21 nt, synthetic construct
  misc_feature 1..21: note = Description of Artificial Sequence: Synthetic oligonucleotide
  source 1..21: mol_type = other RNA
tcacatagcccacttacattt

SEQ ID NO: 52 - RNA, 21 nt, synthetic construct
  misc_feature 1..21: note = Description of Artificial Sequence: Synthetic oligonucleotide
  source 1..21: mol_type = other RNA
cacatagcccacttacattta

SEQ ID NO: 53 - RNA, 21 nt, synthetic construct
  misc_feature 1..21: note = Description of Artificial Sequence: Synthetic oligonucleotide
  source 1..21: mol_type = other RNA
catagcccacttacatttaca

SEQ ID NO: 54 - RNA, 21 nt, synthetic construct
  misc_feature 1..21: note = Description of Artificial Sequence: Synthetic oligonucleotide
  source 1..21: mol_type = other RNA
agcccacttacatttacaaac

SEQ ID NO: 55 - RNA, 21 nt, synthetic construct
  misc_feature 1..21: note = Description of Artificial Sequence: Synthetic oligonucleotide
  source 1..21: mol_type = other RNA
aatctactcaaagcatgggat

SEQ ID NO: 56 - RNA, 21 nt, synthetic construct
  misc_feature 1..21: note = Description of Artificial Sequence: Synthetic oligonucleotide
  source 1..21: mol_type = other RNA
tactcaaagcatgggattatt

SEQ ID NO: 57 - RNA, 21 nt, synthetic construct
  misc_feature 1..21: note = Description of Artificial Sequence: Synthetic oligonucleotide
  source 1..21: mol_type = other RNA
actcaaagcatgggattatta

SEQ ID NO: 58 - RNA, 21 nt, synthetic construct
  misc_feature 1..21: note = Description of Artificial Sequence: Synthetic oligonucleotide
  source 1..21: mol_type = other RNA
caaagcatgggattattagaa

SEQ ID NO: 59 - RNA, 21 nt, synthetic construct
  misc_feature 1..21: note = Description of Artificial Sequence: Synthetic oligonucleotide
  source 1..21: mol_type = other RNA
aagcatgggattattagaata

SEQ ID NO: 60 - RNA, 21 nt, synthetic construct
  misc_feature 1..21: note = Description of Artificial Sequence: Synthetic oligonucleotide
  source 1..21: mol_type = other RNA
tgggattattagaatcaaaca

SEQ ID NO: 61 - RNA, 21 nt, synthetic construct
  misc_feature 1..21: note = Description of Artificial Sequence: Synthetic oligonucleotide
  source 1..21: mol_type = other RNA
aaagtctgtccttgaaggact

SEQ ID NO: 62 - RNA, 21 nt, synthetic construct
  misc_feature 1..21: note = Description of Artificial Sequence: Synthetic oligonucleotide
  source 1..21: mol_type = other RNA
tctgtccttgaaggactaata

SEQ ID NO: 63 - RNA, 21 nt, synthetic construct
  misc_feature 1..21: note = Description of Artificial Sequence: Synthetic oligonucleotide
  source 1..21: mol_type = other RNA
ctgtccttgaaggactaataa

SEQ ID NO: 64 - RNA, 21 nt, synthetic construct
  misc_feature 1..21: note = Description of Artificial Sequence: Synthetic oligonucleotide
  source 1..21: mol_type = other RNA
gtccttgaaggactaatagaa

SEQ ID NO: 65 - RNA, 21 nt, synthetic construct
  misc_feature 1..21: note = Description of Artificial Sequence: Synthetic oligonucleotide
  source 1..21: mol_type = other RNA
aagtatgttctaacctttaca

SEQ ID NO: 66 - RNA, 21 nt, synthetic construct
  misc_feature 1..21: note = Description of Artificial Sequence: Synthetic oligonucleotide
  source 1..21: mol_type = other RNA
ttctaacctttacatgaggaa

SEQ ID NO: 67 - RNA, 21 nt, synthetic construct
  misc_feature 1..21: note = Description of Artificial Sequence: Synthetic oligonucleotide
  source 1..21: mol_type = other RNA
acctttacatgaggactctat

SEQ ID NO: 68 - RNA, 21 nt, synthetic construct
  misc_feature 1..21: note = Description of Artificial Sequence: Synthetic oligonucleotide
  source 1..21: mol_type = other RNA
tttacatgaggactctattct

SEQ ID NO: 69 - RNA, 21 nt, synthetic construct
  misc_feature 1..21: note = Description of Artificial Sequence: Synthetic oligonucleotide
  source 1..21: mol_type = other RNA
ttacatgaggactctattctt

SEQ ID NO: 70 - RNA, 21 nt, synthetic construct
  misc_feature 1..21: note = Description of Artificial Sequence: Synthetic oligonucleotide
  source 1..21: mol_type = other RNA
tacatgaggactctattcttt

SEQ ID NO: 71 - RNA, 21 nt, synthetic construct
  misc_feature 1..21: note = Description of Artificial Sequence: Synthetic oligonucleotide
  source 1..21: mol_type = other RNA
tgaggactctattctttaact

SEQ ID NO: 72 - RNA, 21 nt, synthetic construct
  misc_feature 1..21: note = Description of Artificial Sequence: Synthetic oligonucleotide
  source 1..21: mol_type = other RNA
aggactctattctttaactca

SEQ ID NO: 73 - RNA, 21 nt, synthetic construct
  misc_feature 1..21: note = Description of Artificial Sequence: Synthetic oligonucleotide
  source 1..21: mol_type = other RNA
ctctattctttaactcccatt

SEQ ID NO: 74 - RNA, 21 nt, synthetic construct
  misc_feature 1..21: note = Description of Artificial Sequence: Synthetic oligonucleotide
  source 1..21: mol_type = other RNA
tttaactcccattaccatgta

SEQ ID NO: 75 - RNA, 21 nt, synthetic construct
  misc_feature 1..21: note = Description of Artificial Sequence: Synthetic oligonucleotide
  source 1..21: mol_type = other RNA
ttaactcccattaccatgtaa

SEQ ID NO: 76 - RNA, 21 nt, synthetic construct
  misc_feature 1..21: note = Description of Artificial Sequence: Synthetic oligonucleotide
  source 1..21: mol_type = other RNA
taactcccattaccatgtaat

SEQ ID NO: 77 - RNA, 21 nt, synthetic construct
  misc_feature 1..21: note = Description of Artificial Sequence: Synthetic oligonucleotide
  source 1..21: mol_type = other RNA
actcccattaccatgtaatga

SEQ ID NO: 78 - RNA, 21 nt, synthetic construct
  misc_feature 1..21: note = Description of Artificial Sequence: Synthetic oligonucleotide
  source 1..21: mol_type = other RNA
tcccattaccatgtaatggca

SEQ ID NO: 79 - RNA, 21 nt, synthetic construct
  misc_feature 1..21: note = Description of Artificial Sequence: Synthetic oligonucleotide
  source 1..21: mol_type = other RNA
taccatgtaatggcagttata

SEQ ID NO: 80 - RNA, 21 nt, synthetic construct
  misc_feature 1..21: note = Description of Artificial Sequence: Synthetic oligonucleotide
  source 1..21: mol_type = other RNA
taatggcagttatattttgca

SEQ ID NO: 81 - RNA, 21 nt, synthetic construct
  misc_feature 1..21: note = Description of Artificial Sequence: Synthetic oligonucleotide
  source 1..21: mol_type = other RNA
aaagcgtgagcttaaaataca

SEQ ID NO: 82 - RNA, 21 nt, synthetic construct
  misc_feature 1..21: note = Description of Artificial Sequence: Synthetic oligonucleotide
  source 1..21: mol_type = other RNA
aagcgtgagcttaaaatacaa

SEQ ID NO: 83 - RNA, 21 nt, synthetic construct
  misc_feature 1..21: note = Description of Artificial Sequence: Synthetic oligonucleotide
  source 1..21: mol_type = other RNA
tttgttgacattagtctcagt

SEQ ID NO: 84 - RNA, 21 nt, synthetic construct
  misc_feature 1..21: note = Description of Artificial Sequence: Synthetic oligonucleotide
  source 1..21: mol_type = other RNA
ttgttgacattagtctcagta

SEQ ID NO: 85 - RNA, 21 nt, synthetic construct
  misc_feature 1..21: note = Description of Artificial Sequence: Synthetic oligonucleotide
  source 1..21: mol_type = other RNA
tgaaaatgctggctatagata

SEQ ID NO: 86 - RNA, 21 nt, synthetic construct
  misc_feature 1..21: note = Description of Artificial Sequence: Synthetic oligonucleotide
  source 1..21: mol_type = other RNA
ctggctatagatgtcttttca

SEQ ID NO: 87 - RNA, 21 nt, synthetic construct
  misc_feature 1..21: note = Description of Artificial Sequence: Synthetic oligonucleotide
  source 1..21: mol_type = other RNA
taaatatggactgctcaggaa

SEQ ID NO: 88 - RNA, 21 nt, synthetic construct
  misc_feature 1..21: note = Description of Artificial Sequence: Synthetic oligonucleotide
  source 1..21: mol_type = other RNA
atggactgctcaggaaacgaa

SEQ ID NO: 89 - RNA, 21 nt, synthetic construct
  misc_feature 1..21: note = Description of Artificial Sequence: Synthetic oligonucleotide
  source 1..21: mol_type = other RNA
ggactgctcaggaaacgagaa

SEQ ID NO: 90 - RNA, 21 nt, synthetic construct
  misc_feature 1..21: note = Description of Artificial Sequence: Synthetic oligonucleotide
  source 1..21: mol_type = other RNA
tgctcaggaaacgagacttta

SEQ ID NO: 91 - RNA, 21 nt, synthetic construct
  misc_feature 1..21: note = Description of Artificial Sequence: Synthetic oligonucleotide
  source 1..21: mol_type = other RNA
ggaaacgagactttccattaa

SEQ ID NO: 92 - RNA, 21 nt, synthetic construct
  misc_feature 1..21: note = Description of Artificial Sequence: Synthetic oligonucleotide
  source 1..21: mol_type = other RNA
gaaacgagactttccattaca

SEQ ID NO: 93 - RNA, 21 nt, synthetic construct
  misc_feature 1..21: note = Description of Artificial Sequence: Synthetic oligonucleotide
  source 1..21: mol_type = other RNA
tttaattaattgggccagctt

SEQ ID NO: 94 - RNA, 21 nt, synthetic construct
  misc_feature 1..21: note = Description of Artificial Sequence: Synthetic oligonucleotide
  source 1..21: mol_type = other RNA
taattaattgggccagctttt

SEQ ID NO: 95 - RNA, 21 nt, synthetic construct
  misc_feature 1..21: note = Description of Artificial Sequence: Synthetic oligonucleotide
  source 1..21: mol_type = other RNA
ggttttcgagattatcgtttt

SEQ ID NO: 96 - RNA, 21 nt, synthetic construct
  misc_feature 1..21: note = Description of Artificial Sequence: Synthetic oligonucleotide
  source 1..21: mol_type = other RNA
gttttcgagattatcgtttta

SEQ ID NO: 97 - RNA, 21 nt, synthetic construct
  misc_feature 1..21: note = Description of Artificial Sequence: Synthetic oligonucleotide
  source 1..21: mol_type = other RNA
ttttcgagattatcgttttct

SEQ ID NO: 98 - RNA, 21 nt, synthetic construct
  misc_feature 1..21: note = Description of Artificial Sequence: Synthetic oligonucleotide
  source 1..21: mol_type = other RNA
tttcgagattatcgttttctt

SEQ ID NO: 99 - RNA, 21 nt, synthetic construct
  misc_feature 1..21: note = Description of Artificial Sequence: Synthetic oligonucleotide
  source 1..21: mol_type = other RNA
gtattttaaaatagcgttctt

SEQ ID NO: 100 - RNA, 21 nt, synthetic construct
  misc_feature 1..21: note = Description of Artificial Sequence: Synthetic oligonucleotide
  source 1..21: mol_type = other RNA
cgttcttgtaattttacacga

SEQ ID NO: 101 - RNA, 21 nt, synthetic construct
  misc_feature 1..21: note = Description of Artificial Sequence: Synthetic oligonucleotide
  source 1..21: mol_type = other RNA
gttcttgtaattttacacgct

SEQ ID NO: 102 - RNA, 21 nt, synthetic construct
  misc_feature 1..21: note = Description of Artificial Sequence: Synthetic oligonucleotide
  source 1..21: mol_type = other RNA
ttcttgtaattttacacgctt

SEQ ID NO: 103 - RNA, 21 nt, synthetic construct
  misc_feature 1..21: note = Description of Artificial Sequence: Synthetic oligonucleotide
  source 1..21: mol_type = other RNA
tcttgtaattttacacgcttt

SEQ ID NO: 104 - RNA, 21 nt, synthetic construct
  misc_feature 1..21: note = Description of Artificial Sequence: Synthetic oligonucleotide
  source 1..21: mol_type = other RNA
tgtaattttacacgcttttgt

SEQ ID NO: 105 - RNA, 21 nt, synthetic construct
  misc_feature 1..21: note = Description of Artificial Sequence: Synthetic oligonucleotide
  source 1..21: mol_type = other RNA
tggagtgctgttttgttatat

SEQ ID NO: 106 - RNA, 21 nt, synthetic construct
  misc_feature 1..21: note = Description of Artificial Sequence: Synthetic oligonucleotide
  source 1..21: mol_type = other RNA
aggaggaatactgaacatcta

SEQ ID NO: 107 - RNA, 21 nt, synthetic construct
  misc_feature 1..21: note = Description of Artificial Sequence: Synthetic oligonucleotide
  source 1..21: mol_type = other RNA
atctgagtcctggatgatact

SEQ ID NO: 108 - RNA, 21 nt, synthetic construct
  misc_feature 1..21: note = Description of Artificial Sequence: Synthetic oligonucleotide
  source 1..21: mol_type = other RNA
gagtcctggatgatactaata

SEQ ID NO: 109 - RNA, 21 nt, synthetic construct
  misc_feature 1..21: note = Description of Artificial Sequence: Synthetic oligonucleotide
  source 1..21: mol_type = other RNA
agtcctggatgatactaataa

SEQ ID NO: 110 - RNA, 21 nt, synthetic construct
  misc_feature 1..21: note = Description of Artificial Sequence: Synthetic oligonucleotide
  source 1..21: mol_type = other RNA
gtcctggatgatactaataaa

SEQ ID NO: 111 - RNA, 23 nt, synthetic construct
  misc_feature 1..23: note = Description of Artificial Sequence: Synthetic oligonucleotide
  source 1..23: mol_type = other RNA
ttcctcccgacaagtttgcacaa

SEQ ID NO: 112 - RNA, 23 nt, synthetic construct
  misc_feature 1..23: note = Description of Artificial Sequence: Synthetic oligonucleotide
  source 1..23: mol_type = other RNA
agacactgtacagtttaaaaaca

SEQ ID NO: 113 - RNA, 23 nt, synthetic construct
  misc_feature 1..23: note = Description of Artificial Sequence: Synthetic oligonucleotide
  source 1..23: mol_type = other RNA
ttagtgtgttaactatacaaaaa

SEQ ID NO: 114 - RNA, 23 nt, synthetic construct
  misc_feature 1..23: note = Description of Artificial Sequence: Synthetic oligonucleotide
  source 1..23: mol_type = other RNA
tgtagtgtgttaactatacaaaa

SEQ ID NO: 115 - RNA, 23 nt, synthetic construct
  misc_feature 1..23: note = Description of Artificial Sequence: Synthetic oligonucleotide
  source 1..23: mol_type = other RNA
tggtagtgtgttaactatacaaa

SEQ ID NO: 116 - RNA, 23 nt, synthetic construct
  misc_feature 1..23: note = Description of Artificial Sequence: Synthetic oligonucleotide
  source 1..23: mol_type = other RNA
tcggtagtgtgttaactatacaa

SEQ ID NO: 117 - RNA, 23 nt, synthetic construct
  misc_feature 1..23: note = Description of Artificial Sequence: Synthetic oligonucleotide
  source 1..23: mol_type = other RNA
ttcggtagtgtgttaactataca

SEQ ID NO: 118 - RNA, 23 nt, synthetic construct
  misc_feature 1..23: note = Description of Artificial Sequence: Synthetic oligonucleotide
  source 1..23: mol_type = other RNA
attcggtagtgtgttaactatac

SEQ ID NO: 119 - RNA, 23 nt, synthetic construct
  misc_feature 1..23: note = Description of Artificial Sequence: Synthetic oligonucleotide
  source 1..23: mol_type = other RNA
tattcggtagtgtgttaactata

SEQ ID NO: 120 - RNA, 23 nt, synthetic construct
  misc_feature 1..23: note = Description of Artificial Sequence: Synthetic oligonucleotide
  source 1..23: mol_type = other RNA
acattcggtagtgtgttaactat

SEQ ID NO: 121 - RNA, 23 nt, synthetic construct
  misc_feature 1..23: note = Description of Artificial Sequence: Synthetic oligonucleotide
  source 1..23: mol_type = other RNA
tacattcggtagtgtgttaacta

SEQ ID NO: 122 - RNA, 23 nt, synthetic construct
  misc_feature 1..23: note = Description of Artificial Sequence: Synthetic oligonucleotide
  source 1..23: mol_type = other RNA
acacattcggtagtgtgttaact

SEQ ID NO: 123 - RNA, 23 nt, synthetic construct
  misc_feature 1..23: note = Description of Artificial Sequence: Synthetic oligonucleotide
  source 1..23: mol_type = other RNA
tcgtataagctgcatcagagaca

SEQ ID NO: 124 - RNA, 23 nt, synthetic construct
  misc_feature 1..23: note = Description of Artificial Sequence: Synthetic oligonucleotide
  source 1..23: mol_type = other RNA
ttcgtataagctgcatcagagac

SEQ ID NO: 125 - RNA, 23 nt, synthetic construct
  misc_feature 1..23: note = Description of Artificial Sequence: Synthetic oligonucleotide
  source 1..23: mol_type = other RNA
tttcgtataagctgcatcagaga

SEQ ID NO: 126 - RNA, 23 nt, synthetic construct
  misc_feature 1..23: note = Description of Artificial Sequence: Synthetic oligonucleotide
  source 1..23: mol_type = other RNA
atttcgtataagctgcatcagag

SEQ ID NO: 127 - RNA, 23 nt, synthetic construct
  misc_feature 1..23: note = Description of Artificial Sequence: Synthetic oligonucleotide
  source 1..23: mol_type = other RNA
tatttcgtataagctgcatcaga

SEQ ID NO: 128 - RNA, 23 nt, synthetic construct
  misc_feature 1..23: note = Description of Artificial Sequence: Synthetic oligonucleotide
  source 1..23: mol_type = other RNA
tagaacaacaattatttcgtata

SEQ ID NO: 129 - RNA, 23 nt, synthetic construct
  misc_feature 1..23: note = Description of Artificial Sequence: Synthetic oligonucleotide
  source 1..23: mol_type = other RNA
tacctatgaaaaggacaacaata

SEQ ID NO: 130 - RNA, 23 nt, synthetic construct
  misc_feature 1..23: note = Description of Artificial Sequence: Synthetic oligonucleotide
  source 1..23: mol_type = other RNA
aaagcaaaagactagcttcccct

SEQ ID NO: 131 - RNA, 23 nt, synthetic construct
  misc_feature 1..23: note = Description of Artificial Sequence: Synthetic oligonucleotide
  source 1..23: mol_type = other RNA
tagctaactatatgaaaggataa

SEQ ID NO: 132 - RNA, 23 nt, synthetic construct
  misc_feature 1..23: note = Description of Artificial Sequence: Synthetic oligonucleotide
  source 1..23: mol_type = other RNA
ttagctaactatatgaaaggata

SEQ ID NO: 133 - RNA, 23 nt, synthetic construct
  misc_feature 1..23: note = Description of Artificial Sequence: Synthetic oligonucleotide
  source 1..23: mol_type = other RNA
ttgtgtagacaaaagctttttat

SEQ ID NO: 134 - RNA, 23 nt, synthetic construct
  misc_feature 1..23: note = Description of Artificial Sequence: Synthetic oligonucleotide
  source 1..23: mol_type = other RNA
tatgcagggtgtgtagacaaaag

SEQ ID NO: 135 - RNA, 23 nt, synthetic construct
  misc_feature 1..23: note = Description of Artificial Sequence: Synthetic oligonucleotide
  source 1..23: mol_type = other RNA
atatgcagggtgtgtagacaaaa

SEQ ID NO: 136 - RNA, 23 nt, synthetic construct
  misc_feature 1..23: note = Description of Artificial Sequence: Synthetic oligonucleotide
  source 1..23: mol_type = other RNA
aaaactatctcaacttaacttta

SEQ ID NO: 137 - RNA, 23 nt, synthetic construct
  misc_feature 1..23: note = Description of Artificial Sequence: Synthetic oligonucleotide
  source 1..23: mol_type = other RNA
tgaaaactatctcaacttaactt

SEQ ID NO: 138 - RNA, 23 nt, synthetic construct
  misc_feature 1..23: note = Description of Artificial Sequence: Synthetic oligonucleotide
  source 1..23: mol_type = other RNA
tgatgaaaactatctcaacttaa

SEQ ID NO: 139 - RNA, 23 nt, synthetic construct
  misc_feature 1..23: note = Description of Artificial Sequence: Synthetic oligonucleotide
  source 1..23: mol_type = other RNA
agttatggatgaaaactatctca

SEQ ID NO: 140 - RNA, 23 nt, synthetic construct
  misc_feature 1..23: note = Description of Artificial Sequence: Synthetic oligonucleotide
  source 1..23: mol_type = other RNA
tagttatggatgaaaactatctc

SEQ ID NO: 141 - RNA, 23 nt, synthetic construct
  misc_feature 1..23: note = Description of Artificial Sequence: Synthetic oligonucleotide
  source 1..23: mol_type = other RNA
tcagttatggatgaaaactatct

SEQ ID NO: 142 - RNA, 23 nt, synthetic construct
  misc_feature 1..23: note = Description of Artificial Sequence: Synthetic oligonucleotide
  source 1..23: mol_type = other RNA
ttcttaactgatcaagattttgg

SEQ ID NO: 143 - RNA, 23 nt, synthetic construct
  misc_feature 1..23: note = Description of Artificial Sequence: Synthetic oligonucleotide
  source 1..23: mol_type = other RNA
tgggctatgtgaaatttcttaac

SEQ ID NO: 144 - RNA, 23 nt, synthetic construct
  misc_feature 1..23: note = Description of Artificial Sequence: Synthetic oligonucleotide
  source 1..23: mol_type = other RNA
aatgtaagtgggctatgtgaaat

SEQ ID NO: 145 - RNA, 23 nt, synthetic construct
  misc_feature 1..23: note = Description of Artificial Sequence: Synthetic oligonucleotide
  source 1..23: mol_type = other RNA
aaatgtaagtgggctatgtgaaa

SEQ ID NO: 146 - RNA, 23 nt, synthetic construct
  misc_feature 1..23: note = Description of Artificial Sequence: Synthetic oligonucleotide
  source 1..23: mol_type = other RNA
taaatgtaagtgggctatgtgaa

SEQ ID NO: 147 - RNA, 23 nt, synthetic construct
  misc_feature 1..23: note = Description of Artificial Sequence: Synthetic oligonucleotide
  source 1..23: mol_type = other RNA
tgtaaatgtaagtgggctatgtg

SEQ ID NO: 148 - RNA, 23 nt, synthetic construct
  misc_feature 1..23: note = Description of Artificial Sequence: Synthetic oligonucleotide
  source 1..23: mol_type = other RNA
gtttgtaaatgtaagtgggctat

SEQ ID NO: 149 - RNA, 23 nt, synthetic construct
  misc_feature 1..23: note = Description of Artificial Sequence: Synthetic oligonucleotide
  source 1..23: mol_type = other RNA
atcccatgctttgagtagattga

SEQ ID NO: 150 - RNA, 23 nt, synthetic construct
  misc_feature 1..23: note = Description of Artificial Sequence: Synthetic oligonucleotide
  source 1..23: mol_type = other RNA
aataatcccatgctttgagtaga

SEQ ID NO: 151 - RNA, 23 nt, synthetic construct
  misc_feature 1..23: note = Description of Artificial Sequence: Synthetic oligonucleotide
  source 1..23: mol_type = other RNA
taataatcccatgctttgagtag

SEQ ID NO: 152 - RNA, 23 nt, synthetic construct
  misc_feature 1..23: note = Description of Artificial Sequence: Synthetic oligonucleotide
  source 1..23: mol_type = other RNA
ttctaataatcccatgctttgag

SEQ ID NO: 153 - RNA, 23 nt, synthetic construct
  misc_feature 1..23: note = Description of Artificial Sequence: Synthetic oligonucleotide
  source 1..23: mol_type = other RNA
tattctaataatcccatgctttg

SEQ ID NO: 154 - RNA, 23 nt, synthetic construct
  misc_feature 1..23: note = Description of Artificial Sequence: Synthetic oligonucleotide
  source 1..23: mol_type = other RNA
tgtttgattctaataatcccatg

SEQ ID NO: 155 - RNA, 23 nt, synthetic construct
  misc_feature 1..23: note = Description of Artificial Sequence: Synthetic oligonucleotide
  source 1..23: mol_type = other RNA
agtccttcaaggacagactttca

SEQ ID NO: 156 - RNA, 23 nt, synthetic construct
  misc_feature 1..23: note = Description of Artificial Sequence: Synthetic oligonucleotide
  source 1..23: mol_type = other RNA
tattagtccttcaaggacagact

SEQ ID NO: 157 - RNA, 23 nt, synthetic construct
  misc_feature 1..23: note = Description of Artificial Sequence: Synthetic oligonucleotide
  source 1..23: mol_type = other RNA
ttattagtccttcaaggacagac

SEQ ID NO: 158 - RNA, 23 nt, synthetic construct
  misc_feature 1..23: note = Description of Artificial Sequence: Synthetic oligonucleotide
  source 1..23: mol_type = other RNA
ttctattagtccttcaaggacag

SEQ ID NO: 159 - RNA, 23 nt, synthetic construct
  misc_feature 1..23: note = Description of Artificial Sequence: Synthetic oligonucleotide
  source 1..23: mol_type = other RNA
tgtaaaggttagaacatactttt

SEQ ID NO: 160 - RNA, 23 nt, synthetic construct
  misc_feature 1..23: note = Description of Artificial Sequence: Synthetic oligonucleotide
  source 1..23: mol_type = other RNA
ttcctcatgtaaaggttagaaca

SEQ ID NO: 161 - RNA, 23 nt, synthetic construct
  misc_feature 1..23: note = Description of Artificial Sequence: Synthetic oligonucleotide
  source 1..23: mol_type = other RNA
atagagtcctcatgtaaaggtta

SEQ ID NO: 162 - RNA, 23 nt, synthetic construct
  misc_feature 1..23: note = Description of Artificial Sequence: Synthetic oligonucleotide
  source 1..23: mol_type = other RNA
agaatagagtcctcatgtaaagg

SEQ ID NO: 163 - RNA, 23 nt, synthetic construct
  misc_feature 1..23: note = Description of Artificial Sequence: Synthetic oligonucleotide
  source 1..23: mol_type = other RNA
aagaatagagtcctcatgtaaag

SEQ ID NO: 164 - RNA, 23 nt, synthetic construct
  misc_feature 1..23: note = Description of Artificial Sequence: Synthetic oligonucleotide
  source 1..23: mol_type = other RNA
aaagaatagagtcctcatgtaaa

SEQ ID NO: 165 - RNA, 23 nt, synthetic construct
  misc_feature 1..23: note = Description of Artificial Sequence: Synthetic oligonucleotide
  source 1..23: mol_type = other RNA
agttaaagaatagagtcctcatg

SEQ ID NO: 166 - RNA, 23 nt, synthetic construct
  misc_feature 1..23: note = Description of Artificial Sequence: Synthetic oligonucleotide
  source 1..23: mol_type = other RNA
tgagttaaagaatagagtcctca

SEQ ID NO: 167 - RNA, 23 nt, synthetic construct
  misc_feature 1..23: note = Description of Artificial Sequence: Synthetic oligonucleotide
  source 1..23: mol_type = other RNA
aatgggagttaaagaatagagtc

SEQ ID NO: 168 - RNA, 23 nt, synthetic construct
  misc_feature 1..23: note = Description of Artificial Sequence: Synthetic oligonucleotide
  source 1..23: mol_type = other RNA
tacatggtaatgggagttaaaga

SEQ ID NO: 169 - RNA, 23 nt, synthetic construct
  misc_feature 1..23: note = Description of Artificial Sequence: Synthetic oligonucleotide
  source 1..23: mol_type = other RNA
ttacatggtaatgggagttaaag

SEQ ID NO: 170 - RNA, 23 nt, synthetic construct
  misc_feature 1..23: note = Description of Artificial Sequence: Synthetic oligonucleotide
  source 1..23: mol_type = other RNA
attacatggtaatgggagttaaa

SEQ ID NO: 171 - RNA, 23 nt, synthetic construct
  misc_feature 1..23: note = Description of Artificial Sequence: Synthetic oligonucleotide
  source 1..23: mol_type = other RNA
tcattacatggtaatgggagtta

SEQ ID NO: 172 - RNA, 23 nt, synthetic construct
  misc_feature 1..23: note = Description of Artificial Sequence: Synthetic oligonucleotide
  source 1..23: mol_type = other RNA
tgccattacatggtaatgggagt

SEQ ID NO: 173 - RNA, 23 nt, synthetic construct
  misc_feature 1..23: note = Description of Artificial Sequence: Synthetic oligonucleotide
  source 1..23: mol_type = other RNA
tataactgccattacatggtaat

SEQ ID NO: 174 - RNA, 23 nt, synthetic construct
  misc_feature 1..23: note = Description of Artificial Sequence: Synthetic oligonucleotide
  source 1..23: mol_type = other RNA
tgcaaaatataactgccattaca

SEQ ID NO: 175 - RNA, 23 nt, synthetic construct
  misc_feature 1..23: note = Description of Artificial Sequence: Synthetic oligonucleotide
  source 1..23: mol_type = other RNA
tgtattttaagctcacgcttttg

SEQ ID NO: 176 - RNA, 23 nt, synthetic construct
  misc_feature 1..23: note = Description of Artificial Sequence: Synthetic oligonucleotide
  source 1..23: mol_type = other RNA
ttgtattttaagctcacgctttt

SEQ ID NO: 177 - RNA, 23 nt, synthetic construct
  misc_feature 1..23: note = Description of Artificial Sequence: Synthetic oligonucleotide
  source 1..23: mol_type = other RNA
actgagactaatgtcaacaaaaa

SEQ ID NO: 178 - RNA, 23 nt, synthetic construct
  misc_feature 1..23: note = Description of Artificial Sequence: Synthetic oligonucleotide
  source 1..23: mol_type = other RNA
tactgagactaatgtcaacaaaa

SEQ ID NO: 179 - RNA, 23 nt, synthetic construct
  misc_feature 1..23: note = Description of Artificial Sequence: Synthetic oligonucleotide
  source 1..23: mol_type = other RNA
tatctatagccagcattttcata

SEQ ID NO: 180 - RNA, 23 nt, synthetic construct
  misc_feature 1..23: note = Description of Artificial Sequence: Synthetic oligonucleotide
  source 1..23: mol_type = other RNA
tgaaaagacatctatagccagca

SEQ ID NO: 181 - RNA, 23 nt, synthetic construct
  misc_feature 1..23: note = Description of Artificial Sequence: Synthetic oligonucleotide
  source 1..23: mol_type = other RNA
ttcctgagcagtccatatttaga

SEQ ID NO: 182 - RNA, 23 nt, synthetic construct
  misc_feature 1..23: note = Description of Artificial Sequence: Synthetic oligonucleotide
  source 1..23: mol_type = other RNA
ttcgtttcctgagcagtccatat

SEQ ID NO: 183 - RNA, 23 nt, synthetic construct
  misc_feature 1..23: note = Description of Artificial Sequence: Synthetic oligonucleotide
  source 1..23: mol_type = other RNA
ttctcgtttcctgagcagtccat

SEQ ID NO: 184 - RNA, 23 nt, synthetic construct
  misc_feature 1..23: note = Description of Artificial Sequence: Synthetic oligonucleotide
  source 1..23: mol_type = other RNA
taaagtctcgtttcctgagcagt

SEQ ID NO: 185 - RNA, 23 nt, synthetic construct
  misc_feature 1..23: note = Description of Artificial Sequence: Synthetic oligonucleotide
  source 1..23: mol_type = other RNA
ttaatggaaagtctcgtttcctg

SEQ ID NO: 186 - RNA, 23 nt, synthetic construct
  misc_feature 1..23: note = Description of Artificial Sequence: Synthetic oligonucleotide
  source 1..23: mol_type = other RNA
tgtaatggaaagtctcgtttcct

SEQ ID NO: 187 - RNA, 23 nt, synthetic construct
  misc_feature 1..23: note = Description of Artificial Sequence: Synthetic oligonucleotide
  source 1..23: mol_type = other RNA
aagctggcccaattaattaaaaa

SEQ ID NO: 188 - RNA, 23 nt, synthetic construct
  misc_feature 1..23: note = Description of Artificial Sequence: Synthetic oligonucleotide
  source 1..23: mol_type = other RNA
aaaagctggcccaattaattaaa

SEQ ID NO: 189 - RNA, 23 nt, synthetic construct
  misc_feature 1..23: note = Description of Artificial Sequence: Synthetic oligonucleotide
  source 1..23: mol_type = other RNA
aaaacgataatctcgaaaaccac

SEQ ID NO: 190 - RNA, 23 nt, synthetic construct
  misc_feature 1..23: note = Description of Artificial Sequence: Synthetic oligonucleotide
  source 1..23: mol_type = other RNA
taaaacgataatctcgaaaacca

SEQ ID NO: 191 - RNA, 23 nt, synthetic construct
  misc_feature 1..23: note = Description of Artificial Sequence: Synthetic oligonucleotide
  source 1..23: mol_type = other RNA
agaaaacgataatctcgaaaacc

SEQ ID NO: 192 - RNA, 23 nt, synthetic construct
  misc_feature 1..23: note = Description of Artificial Sequence: Synthetic oligonucleotide
  source 1..23: mol_type = other RNA
aagaaaacgataatctcgaaaac

SEQ ID NO: 193 - RNA, 23 nt, synthetic construct
  misc_feature 1..23: note = Description of Artificial Sequence: Synthetic oligonucleotide
  source 1..23: mol_type = other RNA
aagaacgctattttaaaatactg

SEQ ID NO: 194 - RNA, 23 nt, synthetic construct
  misc_feature 1..23: note = Description of Artificial Sequence: Synthetic oligonucleotide
  source 1..23: mol_type = other RNA
tcgtgtaaaattacaagaacgct

SEQ ID NO: 195 - RNA, 23 nt, synthetic construct
  misc_feature 1..23: note = Description of Artificial Sequence: Synthetic oligonucleotide
  source 1..23: mol_type = other RNA
agcgtgtaaaattacaagaacgc

SEQ ID NO: 196 - RNA, 23 nt, synthetic construct
  misc_feature 1..23: note = Description of Artificial Sequence: Synthetic oligonucleotide
  source 1..23: mol_type = other RNA
aagcgtgtaaaattacaagaacg

SEQ ID NO: 197 - RNA, 23 nt, synthetic construct
  misc_feature 1..23: note = Description of Artificial Sequence: Synthetic oligonucleotide
  source 1..23: mol_type = other RNA
aaagcgtgtaaaattacaagaac

SEQ ID NO: 198 - RNA, 23 nt, synthetic construct
  misc_feature 1..23: note = Description of Artificial Sequence: Synthetic oligonucleotide
  source 1..23: mol_type = other RNA
acaaaagcgtgtaaaattacaag

SEQ ID NO: 199 - RNA, 23 nt, synthetic construct
  misc_feature 1..23: note = Description of Artificial Sequence: Synthetic oligonucleotide
  source 1..23: mol_type = other RNA
atataacaaaacagcactccatc

SEQ ID NO: 200 - RNA, 23 nt, synthetic construct
  misc_feature 1..23: note = Description of Artificial Sequence: Synthetic oligonucleotide
  source 1..23: mol_type = other RNA
tagatgttcagtattcctcctga

SEQ ID NO: 201 - RNA, 23 nt, synthetic construct
  misc_feature 1..23: note = Description of Artificial Sequence: Synthetic oligonucleotide
  source 1..23: mol_type = other RNA
agtatcatccaggactcagatgt

SEQ ID NO: 202 - RNA, 23 nt, synthetic construct
  misc_feature 1..23: note = Description of Artificial Sequence: Synthetic oligonucleotide
  source 1..23: mol_type = other RNA
tattagtatcatccaggactcag

SEQ ID NO: 203 - RNA, 23 nt, synthetic construct
  misc_feature 1..23: note = Description of Artificial Sequence: Synthetic oligonucleotide
  source 1..23: mol_type = other RNA
ttattagtatcatccaggactca

SEQ ID NO: 204 - RNA, 23 nt, synthetic construct
  misc_feature 1..23: note = Description of Artificial Sequence: Synthetic oligonucleotide
  source 1..23: mol_type = other RNA
tttattagtatcatccaggactc

SEQ ID NO: 205 - RNA, 21 nt, synthetic construct
  misc_feature 1..21: note = Description of Artificial Sequence: Synthetic oligonucleotide
  source 1..21: mol_type = other RNA
  modified_base 1: mod_base = OTHER; note = 2'-O-methyluridine-3'-phosphorothioate
  modified_base 2: mod_base = OTHER; note = 2'-O-methyladenosine-3'-phosphorothioate
  modified_base 3: mod_base = OTHER; note = 2'-O-methylcytidine-3'-phosphate
  modified_base 4: mod_base = OTHER; note = 2'-O-methylguanosine-3'-phosphate
  modified_base 5: mod_base = OTHER; note = 2'-O-methyladenosine-3'-phosphate
  modified_base 6: mod_base = OTHER; note = 2'-O-methyladenosine-3'-phosphate
  modified_base 7: mod_base = OTHER; note = 2'-fluoroadenosine-3'-phosphate
  modified_base 8: mod_base = OTHER; note = 2'-O-methyluridine-3'-phosphate
  modified_base 9: mod_base = OTHER; note = 2'-fluoroadenosine-3'-phosphate
  modified_base 10: mod_base = OTHER; note = 2'-fluoroadenosine-3'-phosphate
  modified_base 11: mod_base = OTHER; note = 2'-fluorouridine-3'-phosphate
  modified_base 12: mod_base = OTHER; note = 2'-O-methyluridine-3'-phosphate
  modified_base 13: mod_base = OTHER; note = 2'-O-methylguanosine-3'-phosphate
  modified_base 14: mod_base = OTHER; note = 2'-O-methyluridine-3'-phosphate
  modified_base 15: mod_base = OTHER; note = 2'-O-methyluridine-3'-phosphate
  modified_base 16: mod_base = OTHER; note = 2'-O-methylguanosine-3'-phosphate
  modified_base 17: mod_base = OTHER; note = 2'-O-methyluridine-3'-phosphate
  modified_base 18: mod_base = OTHER; note = 2'-O-methyluridine-3'-phosphate
  modified_base 19: mod_base = OTHER; note = 2'-O-methylcytidine-3'-phosphate
  modified_base 20: mod_base = OTHER; note = 2'-O-methyluridine-3'-phosphate
  modified_base 21: mod_base = OTHER; note = 2'-O-methyladenosine-3'-phosphate attached to N-[tris(N-acetylgalactosamine-alkyl)-amidodecanoyl)]-4-hydr oxyprolinol (Hyp-(GalNAc-alkyl)3)
tacgaaataattgttgttcta

SEQ ID NO: 206 - RNA, 21 nt, synthetic construct
  misc_feature 1..21: note = Description of Artificial Sequence: Synthetic oligonucleotide
  source 1..21: mol_type = other RNA
  modified_base 1: mod_base = OTHER; note = 2'-O-methyladenosine-3'-phosphorothioate
  modified_base 2: mod_base = OTHER; note = 2'-O-methyluridine-3'-phosphorothioate
  modified_base 3: mod_base = OTHER; note = 2'-O-methylcytidine-3'-phosphate
  modified_base 4: mod_base = OTHER; note = 2'-O-methylcytidine-3'-phosphate
  modified_base 5: mod_base = OTHER; note = 2'-O-methyluridine-3'-phosphate
  modified_base 6: mod_base = OTHER; note = 2'-O-methyluridine-3'-phosphate
  modified_base 7: mod_base = OTHER; note = 2'-fluorouridine-3'-phosphate
  modified_base 8: mod_base = OTHER; note = 2'-O-methylcytidine-3'-phosphate
  modified_base 9: mod_base = OTHER; note = 2'-fluoroadenosine-3'-phosphate
  modified_base 10: mod_base = OTHER; note = 2'-fluorouridine-3'-phosphate
  modified_base 11: mod_base = OTHER; note = 2'-fluoroadenosine-3'-phosphate
  modified_base 12: mod_base = OTHER; note = 2'-O-methyluridine-3'-phosphate
  modified_base 13: mod_base = OTHER; note = 2'-O-methyladenosine-3'-phosphate
  modified_base 14: mod_base = OTHER; note = 2'-O-methylguanosine-3'-phosphate
  modified_base 15: mod_base = OTHER; note = 2'-O-methyluridine-3'-phosphate
  modified_base 16: mod_base = OTHER; note = 2'-O-methyluridine-3'-phosphate
  modified_base 17: mod_base = OTHER; note = 2'-O-methyladenosine-3'-phosphate
  modified_base 18: mod_base = OTHER; note = 2'-O-methylguanosine-3'-phosphate
  modified_base 19: mod_base = OTHER; note = 2'-O-methylcytidine-3'-phosphate
  modified_base 20: mod_base = OTHER; note = 2'-O-methyluridine-3'-phosphate
  modified_base 21: mod_base = OTHER; note = 2'-O-methyladenosine-3'-phosphate attached to N-[tris(N-acetylgalactosamine-alkyl)-amidodecanoyl)]-4-hydr oxyprolinol (Hyp-(GalNAc-alkyl)3)
atcctttcatatagttagcta

SEQ ID NO: 207 - RNA, 21 nt, synthetic construct
  misc_feature 1..21: note = Description of Artificial Sequence: Synthetic oligonucleotide
  source 1..21: mol_type = other RNA
  modified_base 1: mod_base = OTHER; note = 2'-O-methylcytidine-3'-phosphorothioate
  modified_base 2: mod_base = OTHER; note = 2'-O-methyladenosine-3'-phosphorothioate
  modified_base 3: mod_base = OTHER; note = 2'-O-methylcytidine-3'-phosphate
  modified_base 4: mod_base = OTHER; note = 2'-O-methyladenosine-3'-phosphate
  modified_base 5: mod_base = OTHER; note = 2'-O-methyluridine-3'-phosphate
  modified_base 6: mod_base = OTHER; note = 2'-O-methyladenosine-3'-phosphate
  modified_base 7: mod_base = OTHER; note = 2'-fluoroguanosine-3'-phosphate
  modified_base 8: mod_base = OTHER; note = 2'-O-methylcytidine-3'-phosphate
  modified_base 9: mod_base = OTHER; note = 2'-fluorocytidine-3'-phosphate
  modified_base 10: mod_base = OTHER; note = 2'-fluorocytidine-3'-phosphate
  modified_base 11: mod_base = OTHER; note = 2'-fluoroadenosine-3'-phosphate
  modified_base 12: mod_base = OTHER; note = 2'-O-methylcytidine-3'-phosphate
  modified_base 13: mod_base = OTHER; note = 2'-O-methyluridine-3'-phosphate
  modified_base 14: mod_base = OTHER; note = 2'-O-methyluridine-3'-phosphate
  modified_base 15: mod_base = OTHER; note = 2'-O-methyladenosine-3'-phosphate
  modified_base 16: mod_base = OTHER; note = 2'-O-methylcytidine-3'-phosphate
  modified_base 17: mod_base = OTHER; note = 2'-O-methyladenosine-3'-phosphate
  modified_base 18: mod_base = OTHER; note = 2'-O-methyluridine-3'-phosphate
  modified_base 19: mod_base = OTHER; note = 2'-O-methyluridine-3'-phosphate
  modified_base 20: mod_base = OTHER; note = 2'-O-methyluridine-3'-phosphate
  modified_base 21: mod_base = OTHER; note = 2'-O-methyladenosine-3'-phosphate attached to N-[tris(N-acetylgalactosamine-alkyl)-amidodecanoyl)]-4-hydr oxyprolinol (Hyp-(GalNAc-alkyl)3)
cacatagcccacttacattta

SEQ ID NO: 208 - RNA, 21 nt, synthetic construct
  misc_feature 1..21: note = Description of Artificial Sequence: Synthetic oligonucleotide
  source 1..21: mol_type = other RNA
  modified_base 1: mod_base = OTHER; note = 2'-O-methylguanosine-3'-phosphorothioate
  modified_base 2: mod_base = OTHER; note = 2'-O-methyluridine-3'-phosphorothioate
  modified_base 3: mod_base = OTHER; note = 2'-O-methylcytidine-3'-phosphate
  modified_base 4: mod_base = OTHER; note = 2'-O-methylcytidine-3'-phosphate
  modified_base 5: mod_base = OTHER; note = 2'-O-methyluridine-3'-phosphate
  modified_base 6: mod_base = OTHER; note = 2'-O-methylguanosine-3'-phosphate
  modified_base 7: mod_base = OTHER; note = 2'-fluoroguanosine-3'-phosphate
  modified_base 8: mod_base = OTHER; note = 2'-O-methyladenosine-3'-phosphate
  modified_base 9: mod_base = OTHER; note = 2'-fluorouridine-3'-phosphate
  modified_base 10: mod_base = OTHER; note = 2'-fluoroguanosine-3'-phosphate
  modified_base 11: mod_base = OTHER; note = 2'-fluoroadenosine-3'-phosphate
  modified_base 12: mod_base = OTHER; note = 2'-O-methyluridine-3'-phosphate
  modified_base 13: mod_base = OTHER; note = 2'-O-methyladenosine-3'-phosphate
  modified_base 14: mod_base = OTHER; note = 2'-O-methylcytidine-3'-phosphate
  modified_base 15: mod_base = OTHER; note = 2'-O-methyluridine-3'-phosphate
  modified_base 16: mod_base = OTHER; note = 2'-O-methyladenosine-3'-phosphate
  modified_base 17: mod_base = OTHER; note = 2'-O-methyladenosine-3'-phosphate
  modified_base 18: mod_base = OTHER; note = 2'-O-methyluridine-3'-phosphate
  modified_base 19: mod_base = OTHER; note = 2'-O-methyladenosine-3'-phosphate
  modified_base 20: mod_base = OTHER; note = 2'-O-methyladenosine-3'-phosphate
  modified_base 21: mod_base = OTHER; note = 2'-O-methyladenosine-3'-phosphate attached to N-[tris(N-acetylgalactosamine-alkyl)-amidodecanoyl)]-4-hydr oxyprolinol (Hyp-(GalNAc-alkyl)3)
gtcctggatgatactaataaa

SEQ ID NO: 209 - RNA, 21 nt, synthetic construct
  misc_feature 1..21: note = Description of Artificial Sequence: Synthetic oligonucleotide
  source 1..21: mol_type = other RNA
  modified_base 1: mod_base = OTHER; note = 2'-O-methyluridine-3'-phosphorothioate
  modified_base 2: mod_base = OTHER; note = 2'-O-methyluridine-3'-phosphorothioate
  modified_base 3: mod_base = OTHER; note = 2'-O-methylcytidine-3'-phosphate
  modified_base 4: mod_base = OTHER; note = 2'-O-methyladenosine-3'-phosphate
  modified_base 5: mod_base = OTHER; note = 2'-O-methylcytidine-3'-phosphate
  modified_base 6: mod_base = OTHER; note = 2'-O-methyladenosine-3'-phosphate
  modified_base 7: mod_base = OTHER; note = 2'-fluorouridine-3'-phosphate
  modified_base 8: mod_base = OTHER; note = 2'-O-methyladenosine-3'-phosphate
  modified_base 9: mod_base = OTHER; note = 2'-fluoroguanosine-3'-phosphate
  modified_base 10: mod_base = OTHER; note = 2'-fluorocytidine-3'-phosphate
  modified_base 11: mod_base = OTHER; note = 2'-fluorocytidine-3'-phosphate
  modified_base 12: mod_base = OTHER; note = 2'-O-methylcytidine-3'-phosphate
  modified_base 13: mod_base = OTHER; note = 2'-O-methyladenosine-3'-phosphate
  modified_base 14: mod_base = OTHER; note = 2'-O-methylcytidine-3'-phosphate
  modified_base 15: mod_base = OTHER; note = 2'-O-methyluridine-3'-phosphate
  modified_base 16: mod_base = OTHER; note = 2'-O-methyluridine-3'-phosphate
  modified_base 17: mod_base = OTHER; note = 2'-O-methyladenosine-3'-phosphate
  modified_base 18: mod_base = OTHER; note = 2'-O-methylcytidine-3'-phosphate
  modified_base 19: mod_base = OTHER; note = 2'-O-methyladenosine-3'-phosphate
  modified_base 20: mod_base = OTHER; note = 2'-O-methyluridine-3'-phosphate
  modified_base 21: mod_base = OTHER; note = 2'-O-methyluridine-3'-phosphate attached to N-[tris(N-acetylgalactosamine-alkyl)-amidodecanoyl)]-4-hydr oxyprolinol (Hyp-(GalNAc-alkyl)3)
ttcacatagcccacttacatt

SEQ ID NO: 210 - RNA, 21 nt, synthetic construct
  misc_feature 1..21: note = Description of Artificial Sequence: Synthetic oligonucleotide
  source 1..21: mol_type = other RNA
  modified_base 1: mod_base = OTHER; note = 2'-O-methylcytidine-3'-phosphorothioate
  modified_base 2: mod_base = OTHER; note = 2'-O-methyladenosine-3'-phosphorothioate
  modified_base 3: mod_base = OTHER; note = 2'-O-methyluridine-3'-phosphate
  modified_base 4: mod_base = OTHER; note = 2'-O-methyladenosine-3'-phosphate
  modified_base 5: mod_base = OTHER; note = 2'-O-methylguanosine-3'-phosphate
  modified_base 6: mod_base = OTHER; note = 2'-O-methylcytidine-3'-phosphate
  modified_base 7: mod_base = OTHER; note = 2'-fluorocytidine-3'-phosphate
  modified_base 8: mod_base = OTHER; note = 2'-O-methylcytidine-3'-phosphate
  modified_base 9: mod_base = OTHER; note = 2'-fluoroadenosine-3'-phosphate
  modified_base 10: mod_base = OTHER; note = 2'-fluorocytidine-3'-phosphate
  modified_base 11: mod_base = OTHER; note = 2'-fluorouridine-3'-phosphate
  modified_base 12: mod_base = OTHER; note = 2'-O-methyluridine-3'-phosphate
  modified_base 13: mod_base = OTHER; note = 2'-O-methyladenosine-3'-phosphate
  modified_base 14: mod_base = OTHER; note = 2'-O-methylcytidine-3'-phosphate
  modified_base 15: mod_base = OTHER; note = 2'-O-methyladenosine-3'-phosphate
  modified_base 16: mod_base = OTHER; note = 2'-O-methyluridine-3'-phosphate
  modified_base 17: mod_base = OTHER; note = 2'-O-methyluridine-3'-phosphate
  modified_base 18: mod_base = OTHER; note = 2'-O-methyluridine-3'-phosphate
  modified_base 19: mod_base = OTHER; note = 2'-O-methyladenosine-3'-phosphate
  modified_base 20: mod_base = OTHER; note = 2'-O-methylcytidine-3'-phosphate
  modified_base 21: mod_base = OTHER; note = 2'-O-methyladenosine-3'-phosphate attached to N-[tris(N-acetylgalactosamine-alkyl)-amidodecanoyl)]-4-hydr oxyprolinol (Hyp-(GalNAc-alkyl)3)
catagcccacttacatttaca

SEQ ID NO: 211 - RNA, 21 nt, synthetic construct
  misc_feature 1..21: note = Description of Artificial Sequence: Synthetic oligonucleotide
  source 1..21: mol_type = other RNA
  modified_base 1: mod_base = OTHER; note = 2'-O-methyluridine-3'-phosphorothioate
  modified_base 2: mod_base = OTHER; note = 2'-O-methyladenosine-3'-phosphorothioate
  modified_base 3: mod_base = OTHER; note = 2'-O-methylcytidine-3'-phosphate
  modified_base 4: mod_base = OTHER; note = 2'-O-methyladenosine-3'-phosphate
  modified_base 5: mod_base = OTHER; note = 2'-O-methyluridine-3'-phosphate
  modified_base 6: mod_base = OTHER; note = 2'-O-methylguanosine-3'-phosphate
  modified_base 7: mod_base = OTHER; note = 2'-fluoroadenosine-3'-phosphate
  modified_base 8: mod_base = OTHER; note = 2'-O-methylguanosine-3'-phosphate
  modified_base 9: mod_base = OTHER; note = 2'-fluoroguanosine-3'-phosphate
  modified_base 10: mod_base = OTHER; note = 2'-fluoroadenosine-3'-phosphate
  modified_base 11: mod_base = OTHER; note = 2'-fluorocytidine-3'-phosphate
  modified_base 12: mod_base = OTHER; note = 2'-O-methyluridine-3'-phosphate
  modified_base 13: mod_base = OTHER; note = 2'-O-methylcytidine-3'-phosphate
  modified_base 14: mod_base = OTHER; note = 2'-O-methyluridine-3'-phosphate
  modified_base 15: mod_base = OTHER; note = 2'-O-methyladenosine-3'-phosphate
  modified_base 16: mod_base = OTHER; note = 2'-O-methyluridine-3'-phosphate
  modified_base 17: mod_base = OTHER; note = 2'-O-methyluridine-3'-phosphate
  modified_base 18: mod_base = OTHER; note = 2'-O-methylcytidine-3'-phosphate
  modified_base 19: mod_base = OTHER; note = 2'-O-methyluridine-3'-phosphate
  modified_base 20: mod_base = OTHER; note = 2'-O-methyluridine-3'-phosphate
  modified_base 21: mod_base = OTHER; note = 2'-O-methyluridine-3'-phosphate attached to N-[tris(N-acetylgalactosamine-alkyl)-amidodecanoyl)]-4-hydr oxyprolinol (Hyp-(GalNAc-alkyl)3)
tacatgaggactctattcttt

SEQ ID NO: 212 - RNA, 21 nt, synthetic construct
  misc_feature 1..21: note = Description of Artificial Sequence: Synthetic oligonucleotide
  source 1..21: mol_type = other RNA
  modified_base 1: mod_base = OTHER; note = 2'-O-methyluridine-3'-phosphorothioate
  modified_base 2: mod_base = OTHER; note = 2'-O-methylguanosine-3'-phosphorothioate
  modified_base 3: mod_base = OTHER; note = 2'-O-methyladenosine-3'-phosphate
  modified_base 4: mod_base = OTHER; note = 2'-O-methylguanosine-3'-phosphate
  modified_base 5: mod_base = OTHER; note = 2'-O-methylguanosine-3'-phosphate
  modified_base 6: mod_base = OTHER; note = 2'-O-methyladenosine-3'-phosphate
  modified_base 7: mod_base = OTHER; note = 2'-fluorocytidine-3'-phosphate
  modified_base 8: mod_base = OTHER; note = 2'-O-methyluridine-3'-phosphate
  modified_base 9: mod_base = OTHER; note = 2'-fluorocytidine-3'-phosphate
  modified_base 10: mod_base = OTHER; note = 2'-fluorouridine-3'-phosphate
  modified_base 11: mod_base = OTHER; note = 2'-fluoroadenosine-3'-phosphate
  modified_base 12: mod_base = OTHER; note = 2'-O-methyluridine-3'-phosphate
  modified_base 13: mod_base = OTHER; note = 2'-O-methyluridine-3'-phosphate
  modified_base 14: mod_base = OTHER; note = 2'-O-methylcytidine-3'-phosphate
  modified_base 15: mod_base = OTHER; note = 2'-O-methyluridine-3'-phosphate
  modified_base 16: mod_base = OTHER; note = 2'-O-methyluridine-3'-phosphate
  modified_base 17: mod_base = OTHER; note = 2'-O-methyluridine-3'-phosphate
  modified_base 18: mod_base = OTHER; note = 2'-O-methyladenosine-3'-phosphate
  modified_base 19: mod_base = OTHER; note = 2'-O-methyladenosine-3'-phosphate
  modified_base 20: mod_base = OTHER; note = 2'-O-methylcytidine-3'-phosphate
  modified_base 21: mod_base = OTHER; note = 2'-O-methyluridine-3'-phosphate attached to N-[tris(N-acetylgalactosamine-alkyl)-amidodecanoyl)]-4-hydr oxyprolinol (Hyp-(GalNAc-alkyl)3)
tgaggactctattctttaact

SEQ ID NO: 213 - RNA, 21 nt, synthetic construct
  misc_feature 1..21: note = Description of Artificial Sequence: Synthetic oligonucleotide
  source 1..21: mol_type = other RNA
  modified_base 1: mod_base = OTHER; note = 2'-O-methyladenosine-3'-phosphorothioate
  modified_base 2: mod_base = OTHER; note = 2'-O-methyladenosine-3'-phosphorothioate
  modified_base 3: mod_base = OTHER; note = 2'-O-methylguanosine-3'-phosphate
  modified_base 4: mod_base = OTHER; note = 2'-O-methylcytidine-3'-phosphate
  modified_base 5: mod_base = OTHER; note = 2'-O-methylguanosine-3'-phosphate
  modified_base 6: mod_base = OTHER; note = 2'-O-methyluridine-3'-phosphate
  modified_base 7: mod_base = OTHER; note = 2'-fluoroguanosine-3'-phosphate
  modified_base 8: mod_base = OTHER; note = 2'-O-methyladenosine-3'-phosphate
  modified_base 9: mod_base = OTHER; note = 2'-fluoroguanosine-3'-phosphate
  modified_base 10: mod_base = OTHER; note = 2'-fluorocytidine-3'-phosphate
  modified_base 11: mod_base = OTHER; note = 2'-fluorouridine-3'-phosphate
  modified_base 12: mod_base = OTHER; note = 2'-O-methyluridine-3'-phosphate
  modified_base 13: mod_base = OTHER; note = 2'-O-methyladenosine-3'-phosphate
  modified_base 14: mod_base = OTHER; note = 2'-O-methyladenosine-3'-phosphate
  modified_base 15: mod_base = OTHER; note = 2'-O-methyladenosine-3'-phosphate
  modified_base 16: mod_base = OTHER; note = 2'-O-methyladenosine-3'-phosphate
  modified_base 17: mod_base = OTHER; note = 2'-O-methyluridine-3'-phosphate
  modified_base 18: mod_base = OTHER; note = 2'-O-methyladenosine-3'-phosphate
  modified_base 19: mod_base = OTHER; note = 2'-O-methylcytidine-3'-phosphate
  modified_base 20: mod_base = OTHER; note = 2'-O-methyladenosine-3'-phosphate
  modified_base 21: mod_base = OTHER; note = 2'-O-methyladenosine-3'-phosphate attached to N-[tris(N-acetylgalactosamine-alkyl)-amidodecanoyl)]-4-hydr oxyprolinol (Hyp-(GalNAc-alkyl)3)
aagcgtgagcttaaaatacaa

SEQ ID NO: 214 - RNA, 21 nt, synthetic construct
  misc_feature 1..21: note = Description of Artificial Sequence: Synthetic oligonucleotide
  source 1..21: mol_type = other RNA
  modified_base 1: mod_base = OTHER; note = 2'-O-methylguanosine-3'-phosphorothioate
  modified_base 2: mod_base = OTHER; note = 2'-O-methylguanosine-3'-phosphorothioate
  modified_base 3: mod_base = OTHER; note = 2'-O-methyluridine-3'-phosphate
  modified_base 4: mod_base = OTHER; note = 2'-O-methyluridine-3'-phosphate
  modified_base 5: mod_base = OTHER; note = 2'-O-methyluridine-3'-phosphate
  modified_base 6: mod_base = OTHER; note = 2'-O-methyluridine-3'-phosphate
  modified_base 7: mod_base = OTHER; note = 2'-fluorocytidine-3'-phosphate
  modified_base 8: mod_base = OTHER; note = 2'-O-methylguanosine-3'-phosphate
  modified_base 9: mod_base = OTHER; note = 2'-fluoroadenosine-3'-phosphate
  modified_base 10: mod_base = OTHER; note = 2'-fluoroguanosine-3'-phosphate
  modified_base 11: mod_base = OTHER; note = 2'-fluoroadenosine-3'-phosphate
  modified_base 12: mod_base = OTHER; note = 2'-O-methyluridine-3'-phosphate
  modified_base 13: mod_base = OTHER; note = 2'-O-methyluridine-3'-phosphate
  modified_base 14: mod_base = OTHER; note = 2'-O-methyladenosine-3'-phosphate
  modified_base 15: mod_base = OTHER; note = 2'-O-methyluridine-3'-phosphate
  modified_base 16: mod_base = OTHER; note = 2'-O-methylcytidine-3'-phosphate
  modified_base 17: mod_base = OTHER; note = 2'-O-methylguanosine-3'-phosphate
  modified_base 18: mod_base = OTHER; note = 2'-O-methyluridine-3'-phosphate
  modified_base 19: mod_base = OTHER; note = 2'-O-methyluridine-3'-phosphate
  modified_base 20: mod_base = OTHER; note = 2'-O-methyluridine-3'-phosphate
  modified_base 21: mod_base = OTHER; note = 2'-O-methyluridine-3'-phosphate attached to N-[tris(N-acetylgalactosamine-alkyl)-amidodecanoyl)]-4-hydr oxyprolinol (Hyp-(GalNAc-alkyl)3)
ggttttcgagattatcgtttt

SEQ ID NO: 215 - RNA, 21 nt, synthetic construct
  misc_feature 1..21: note = Description of Artificial Sequence: Synthetic oligonucleotide
  source 1..21: mol_type = other RNA
  modified_base 1: mod_base = OTHER; note = 2'-O-methylguanosine-3'-phosphorothioate
  modified_base 2: mod_base = OTHER; note = 2'-O-methyluridine-3'-phosphorothioate
  modified_base 3: mod_base = OTHER; note = 2'-O-methyladenosine-3'-phosphate
  modified_base 4: mod_base = OTHER; note = 2'-O-methyluridine-3'-phosphate
  modified_base 5: mod_base = OTHER; note = 2'-O-methyluridine-3'-phosphate
  modified_base 6: mod_base = OTHER; note = 2'-O-methyluridine-3'-phosphate
  modified_base 7: mod_base = OTHER; note = 2'-fluorouridine-3'-phosphate
  modified_base 8: mod_base = OTHER; note = 2'-O-methyladenosine-3'-phosphate
  modified_base 9: mod_base = OTHER; note = 2'-fluoroadenosine-3'-phosphate
  modified_base 10: mod_base = OTHER; note = 2'-fluoroadenosine-3'-phosphate
  modified_base 11: mod_base = OTHER; note = 2'-fluoroadenosine-3'-phosphate
  modified_base 12: mod_base = OTHER; note = 2'-O-methyluridine-3'-phosphate
  modified_base 13: mod_base = OTHER; note = 2'-O-methyladenosine-3'-phosphate
  modified_base 14: mod_base = OTHER; note = 2'-O-methylguanosine-3'-phosphate
  modified_base 15: mod_base = OTHER; note = 2'-O-methylcytidine-3'-phosphate
  modified_base 16: mod_base = OTHER; note = 2'-O-methylguanosine-3'-phosphate
  modified_base 17: mod_base = OTHER; note = 2'-O-methyluridine-3'-phosphate
  modified_base 18: mod_base = OTHER; note = 2'-O-methyluridine-3'-phosphate
  modified_base 19: mod_base = OTHER; note = 2'-O-methylcytidine-3'-phosphate
  modified_base 20: mod_base = OTHER; note = 2'-O-methyluridine-3'-phosphate
  modified_base 21: mod_base = OTHER; note = 2'-O-methyluridine-3'-phosphate attached to N-[tris(N-acetylgalactosamine-alkyl)-amidodecanoyl)]-4-hydr oxyprolinol (Hyp-(GalNAc-alkyl)3)
gtattttaaaatagcgttctt

SEQ ID NO: 216 - RNA, 21 nt, synthetic construct
  misc_feature 1..21: note = Description of Artificial Sequence: Synthetic oligonucleotide
  source 1..21: mol_type = other RNA
  modified_base 1: mod_base = OTHER; note = 2'-O-methyluridine-3'-phosphorothioate
  modified_base 2: mod_base = OTHER; note = 2'-O-methyluridine-3'-phosphorothioate
  modified_base 3: mod_base = OTHER; note = 2'-O-methylguanosine-3'-phosphate
  modified_base 4: mod_base = OTHER; note = 2'-O-methyluridine-3'-phosphate
  modified_base 5: mod_base = OTHER; note = 2'-O-methyluridine-3'-phosphate
  modified_base 6: mod_base = OTHER; note = 2'-O-methylguanosine-3'-phosphate
  modified_base 7: mod_base = OTHER; note = 2'-fluorouridine-3'-phosphate
  modified_base 8: mod_base = OTHER; note = 2'-O-methylcytidine-3'-phosphate
  modified_base 9: mod_base = OTHER; note = 2'-fluorocytidine-3'-phosphate
  modified_base 10: mod_base = OTHER; note = 2'-fluorouridine-3'-phosphate
  modified_base 11: mod_base = OTHER; note = 2'-fluorouridine-3'-phosphate
  modified_base 12: mod_base = OTHER; note = 2'-O-methyluridine-3'-phosphate
  modified_base 13: mod_base = OTHER; note = 2'-O-methyluridine-3'-phosphate
  modified_base 14: mod_base = OTHER; note = 2'-O-methylcytidine-3'-phosphate
  modified_base 15: mod_base = OTHER; note = 2'-O-methyladenosine-3'-phosphate
  modified_base 16: mod_base = OTHER; note = 2'-O-methyluridine-3'-phosphate
  modified_base 17: mod_base = OTHER; note = 2'-O-methyladenosine-3'-phosphate
  modified_base 18: mod_base = OTHER; note = 2'-O-methylguanosine-3'-phosphate
  modified_base 19: mod_base = OTHER; note = 2'-O-methylguanosine-3'-phosphate
  modified_base 20: mod_base = OTHER; note = 2'-O-methyluridine-3'-phosphate
  modified_base 21: mod_base = OTHER; note = 2'-O-methyladenosine-3'-phosphate attached to N-[tris(N-acetylgalactosamine-alkyl)-amidodecanoyl)]-4-hydr oxyprolinol (Hyp-(GalNAc-alkyl)3)
ttgttgtccttttcataggta

SEQ ID NO: 217 - RNA, 21 nt, synthetic construct
  misc_feature 1..21: note = Description of Artificial Sequence: Synthetic oligonucleotide
  source 1..21: mol_type = other RNA
  modified_base 1: mod_base = OTHER; note = 2'-O-methylguanosine-3'-phosphorothioate
  modified_base 2: mod_base = OTHER; note = 2'-O-methylguanosine-3'-phosphorothioate
  modified_base 3: mod_base = OTHER; note = 2'-O-methyladenosine-3'-phosphate
  modified_base 4: mod_base = OTHER; note = 2'-O-methyladenosine-3'-phosphate
  modified_base 5: mod_base = OTHER; note = 2'-O-methyladenosine-3'-phosphate
  modified_base 6: mod_base = OTHER; note = 2'-O-methylcytidine-3'-phosphate
  modified_base 7: mod_base = OTHER; note = 2'-fluoroguanosine-3'-phosphate
  modified_base 8: mod_base = OTHER; note = 2'-O-methyladenosine-3'-phosphate
  modified_base 9: mod_base = OTHER; note = 2'-fluoroguanosine-3'-phosphate
  modified_base 10: mod_base = OTHER; note = 2'-fluoroadenosine-3'-phosphate
  modified_base 11: mod_base = OTHER; note = 2'-fluorocytidine-3'-phosphate
  modified_base 12: mod_base = OTHER; note = 2'-O-methyluridine-3'-phosphate
  modified_base 13: mod_base = OTHER; note = 2'-O-methyluridine-3'-phosphate
  modified_base 14: mod_base = OTHER; note = 2'-O-methyluridine-3'-phosphate
  modified_base 15: mod_base = OTHER; note = 2'-O-methylcytidine-3'-phosphate
  modified_base 16: mod_base = OTHER; note = 2'-O-methylcytidine-3'-phosphate
  modified_base 17: mod_base = OTHER; note = 2'-O-methyladenosine-3'-phosphate
  modified_base 18: mod_base = OTHER; note = 2'-O-methyluridine-3'-phosphate
  modified_base 19: mod_base = OTHER; note = 2'-O-methyluridine-3'-phosphate
  modified_base 20: mod_base = OTHER; note = 2'-O-methyladenosine-3'-phosphate
  modified_base 21: mod_base = OTHER; note = 2'-O-methyladenosine-3'-phosphate attached to N-[tris(N-acetylgalactosamine-alkyl)-amidodecanoyl)]-4-hydr oxyprolinol (Hyp-(GalNAc-alkyl)3)
ggaaacgagactttccattaa

SEQ ID NO: 218 - RNA, 21 nt, synthetic construct
  misc_feature 1..21: note = Description of Artificial Sequence: Synthetic oligonucleotide
  source 1..21: mol_type = other RNA
  modified_base 1: mod_base = OTHER; note = 2'-O-methylguanosine-3'-phosphorothioate
  modified_base 2: mod_base = OTHER; note = 2'-O-methyluridine-3'-phosphorothioate
  modified_base 3: mod_base = OTHER; note = 2'-O-methyluridine-3'-phosphate
  modified_base 4: mod_base = OTHER; note = 2'-O-methyluridine-3'-phosphate
  modified_base 5: mod_base = OTHER; note = 2'-O-methyluridine-3'-phosphate
  modified_base 6: mod_base = OTHER; note = 2'-O-methylcytidine-3'-phosphate
  modified_base 7: mod_base = OTHER; note = 2'-fluoroguanosine-3'-phosphate
  modified_base 8: mod_base = OTHER; note = 2'-O-methyladenosine-3'-phosphate
  modified_base 9: mod_base = OTHER; note = 2'-fluoroguanosine-3'-phosphate
  modified_base 10: mod_base = OTHER; note = 2'-fluoroadenosine-3'-phosphate
  modified_base 11: mod_base = OTHER; note = 2'-fluorouridine-3'-phosphate
  modified_base 12: mod_base = OTHER; note = 2'-O-methyluridine-3'-phosphate
  modified_base 13: mod_base = OTHER; note = 2'-O-methyladenosine-3'-phosphate
  modified_base 14: mod_base = OTHER; note = 2'-O-methyluridine-3'-phosphate
  modified_base 15: mod_base = OTHER; note = 2'-O-methylcytidine-3'-phosphate
  modified_base 16: mod_base = OTHER; note = 2'-O-methylguanosine-3'-phosphate
  modified_base 17: mod_base = OTHER; note = 2'-O-methyluridine-3'-phosphate
  modified_base 18: mod_base = OTHER; note = 2'-O-methyluridine-3'-phosphate
  modified_base 19: mod_base = OTHER; note = 2'-O-methyluridine-3'-phosphate
  modified_base 20: mod_base = OTHER; note = 2'-O-methyluridine-3'-phosphate
  modified_base 21: mod_base = OTHER; note = 2'-O-methyladenosine-3'-phosphate attached to N-[tris(N-acetylgalactosamine-alkyl)-amidodecanoyl)]-4-hydr oxyprolinol (Hyp-(GalNAc-alkyl)3)
gttttcgagattatcgtttta

SEQ ID NO: 219 - RNA, 21 nt, synthetic construct
  misc_feature 1..21: note = Description of Artificial Sequence: Synthetic oligonucleotide
  source 1..21: mol_type = other RNA
  modified_base 1: mod_base = OTHER; note = 2'-O-methyluridine-3'-phosphorothioate
  modified_base 2: mod_base = OTHER; note = 2'-O-methylguanosine-3'-phosphorothioate
  modified_base 3: mod_base = OTHER; note = 2'-O-methylguanosine-3'-phosphate
  modified_base 4: mod_base = OTHER; note = 2'-O-methyladenosine-3'-phosphate
  modified_base 5: mod_base = OTHER; note = 2'-O-methylguanosine-3'-phosphate
  modified_base 6: mod_base = OTHER; note = 2'-O-methyluridine-3'-phosphate
  modified_base 7: mod_base = OTHER; note = 2'-fluoroguanosine-3'-phosphate
  modified_base 8: mod_base = OTHER; note = 2'-O-methylcytidine-3'-phosphate
  modified_base 9: mod_base = OTHER; note = 2'-fluorouridine-3'-phosphate
  modified_base 10: mod_base = OTHER; note = 2'-fluoroguanosine-3'-phosphate
  modified_base 11: mod_base = OTHER; note = 2'-fluorouridine-3'-phosphate
  modified_base 12: mod_base = OTHER; note = 2'-O-methyluridine-3'-phosphate
  modified_base 13: mod_base = OTHER; note = 2'-O-methyluridine-3'-phosphate
  modified_base 14: mod_base = OTHER; note = 2'-O-methyluridine-3'-phosphate
  modified_base 15: mod_base = OTHER; note = 2'-O-methylguanosine-3'-phosphate
  modified_base 16: mod_base = OTHER; note = 2'-O-methyluridine-3'-phosphate
  modified_base 17: mod_base = OTHER; note = 2'-O-methyluridine-3'-phosphate
  modified_base 18: mod_base = OTHER; note = 2'-O-methyladenosine-3'-phosphate
  modified_base 19: mod_base = OTHER; note = 2'-O-methyluridine-3'-phosphate
  modified_base 20: mod_base = OTHER; note = 2'-O-methyladenosine-3'-phosphate
  modified_base 21: mod_base = OTHER; note = 2'-O-methyluridine-3'-phosphate attached to N-[tris(N-acetylgalactosamine-alkyl)-amidodecanoyl)]-4-hydr oxyprolinol (Hyp-(GalNAc-alkyl)3)
tggagtgctgttttgttatat

SEQ ID NO: 220 - RNA, 21 nt, synthetic construct
  misc_feature 1..21: note = Description of Artificial Sequence: Synthetic oligonucleotide
  source 1..21: mol_type = other RNA
  modified_base 1: mod_base = OTHER; note = 2'-O-methyluridine-3'-phosphorothioate
  modified_base 2: mod_base = OTHER; note = 2'-O-methylcytidine-3'-phosphorothioate
  modified_base 3: mod_base = OTHER; note = 2'-O-methyluridine-3'-phosphate
  modified_base 4: mod_base = OTHER; note = 2'-O-methylguanosine-3'-phosphate
  modified_base 5: mod_base = OTHER; note = 2'-O-methyladenosine-3'-phosphate
  modified_base 6: mod_base = OTHER; note = 2'-O-methyluridine-3'-phosphate
  modified_base 7: mod_base = OTHER; note = 2'-fluoroguanosine-3'-phosphate
  modified_base 8: mod_base = OTHER; note = 2'-O-methylcytidine-3'-phosphate
  modified_base 9: mod_base = OTHER; note = 2'-fluoroadenosine-3'-phosphate
  modified_base 10: mod_base = OTHER; note = 2'-fluoroguanosine-3'-phosphate
  modified_base 11: mod_base = OTHER; note = 2'-fluorocytidine-3'-phosphate
  modified_base 12: mod_base = OTHER; note = 2'-O-methyluridine-3'-phosphate
  modified_base 13: mod_base = OTHER; note = 2'-O-methyluridine-3'-phosphate
  modified_base 14: mod_base = OTHER; note = 2'-O-methyladenosine-3'-phosphate
  modified_base 15: mod_base = OTHER; note = 2'-O-methyluridine-3'-phosphate
  modified_base 16: mod_base = OTHER; note = 2'-O-methyladenosine-3'-phosphate
  modified_base 17: mod_base = OTHER; note = 2'-O-methylcytidine-3'-phosphate
  modified_base 18: mod_base = OTHER; note = 2'-O-methylguanosine-3'-phosphate
  modified_base 19: mod_base = OTHER; note = 2'-O-methyladenosine-3'-phosphate
  modified_base 20: mod_base = OTHER; note = 2'-O-methyladenosine-3'-phosphate
  modified_base 21: mod_base = OTHER; note = 2'-O-methyladenosine-3'-phosphate attached to N-[tris(N-acetylgalactosamine-alkyl)-amidodecanoyl)]-4-hydr oxyprolinol (Hyp-(GalNAc-alkyl)3)
tctgatgcagcttatacgaaa

SEQ ID NO: 221 - RNA, 21 nt, synthetic construct
  misc_feature 1..21: note = Description of Artificial Sequence: Synthetic oligonucleotide
  source 1..21: mol_type = other RNA
  modified_base 1: mod_base = OTHER; note = 2'-O-methylcytidine-3'-phosphorothioate
  modified_base 2: mod_base = OTHER; note = 2'-O-methyluridine-3'-phosphorothioate
  modified_base 3: mod_base = OTHER; note = 2'-O-methylguanosine-3'-phosphate
  modified_base 4: mod_base = OTHER; note = 2'-O-methyladenosine-3'-phosphate
  modified_base 5: mod_base = OTHER; note = 2'-O-methyluridine-3'-phosphate
  modified_base 6: mod_base = OTHER; note = 2'-O-methylguanosine-3'-phosphate
  modified_base 7: mod_base = OTHER; note = 2'-fluorocytidine-3'-phosphate
  modified_base 8: mod_base = OTHER; note = 2'-O-methyladenosine-3'-phosphate
  modified_base 9: mod_base = OTHER; note = 2'-fluoroguanosine-3'-phosphate
  modified_base 10: mod_base = OTHER; note = 2'-fluorocytidine-3'-phosphate
  modified_base 11: mod_base = OTHER; note = 2'-fluorouridine-3'-phosphate
  modified_base 12: mod_base = OTHER; note = 2'-O-methyluridine-3'-phosphate
  modified_base 13: mod_base = OTHER; note = 2'-O-methyladenosine-3'-phosphate
  modified_base 14: mod_base = OTHER; note = 2'-O-methyluridine-3'-phosphate
  modified_base 15: mod_base = OTHER; note = 2'-O-methyladenosine-3'-phosphate
  modified_base 16: mod_base = OTHER; note = 2'-O-methylcytidine-3'-phosphate
  modified_base 17: mod_base = OTHER; note = 2'-O-methylguanosine-3'-phosphate
  modified_base 18: mod_base = OTHER; note = 2'-O-methyladenosine-3'-phosphate
  modified_base 19: mod_base = OTHER; note = 2'-O-methyladenosine-3'-phosphate
  modified_base 20: mod_base = OTHER; note = 2'-O-methyladenosine-3'-phosphate
  modified_base 21: mod_base = OTHER; note = 2'-O-methyluridine-3'-phosphate attached to N-[tris(N-acetylgalactosamine-alkyl)-amidodecanoyl)]-4-hydr oxyprolinol (Hyp-(GalNAc-alkyl)3)
ctgatgcagcttatacgaaat

SEQ ID NO: 222 - RNA, 21 nt, synthetic construct
  misc_feature 1..21: note = Description of Artificial Sequence: Synthetic oligonucleotide
  source 1..21: mol_type = other RNA
  modified_base 1: mod_base = OTHER; note = 2'-O-methylguanosine-3'-phosphorothioate
  modified_base 2: mod_base = OTHER; note = 2'-O-methyladenosine-3'-phosphorothioate
  modified_base 3: mod_base = OTHER; note = 2'-O-methyluridine-3'-phosphate
  modified_base 4: mod_base = OTHER; note = 2'-O-methyladenosine-3'-phosphate
  modified_base 5: mod_base = OTHER; note = 2'-O-methylguanosine-3'-phosphate
  modified_base 6: mod_base = OTHER; note = 2'-O-methyluridine-3'-phosphate
  modified_base 7: mod_base = OTHER; note = 2'-fluorouridine-3'-phosphate
  modified_base 8: mod_base = OTHER; note = 2'-O-methyluridine-3'-phosphate
  modified_base 9: mod_base = OTHER; note = 2'-fluorouridine-3'-phosphate
  modified_base 10: mod_base = OTHER; note = 2'-fluorocytidine-3'-phosphate
  modified_base 11: mod_base = OTHER; note = 2'-fluoroadenosine-3'-phosphate
  modified_base 12: mod_base = OTHER; note = 2'-O-methyluridine-3'-phosphate
  modified_base 13: mod_base = OTHER; note = 2'-O-methylcytidine-3'-phosphate
  modified_base 14: mod_base = OTHER; note = 2'-O-methylcytidine-3'-phosphate
  modified_base 15: mod_base = OTHER; note = 2'-O-methyladenosine-3'-phosphate
  modified_base 16: mod_base = OTHER; note = 2'-O-methyluridine-3'-phosphate
  modified_base 17: mod_base = OTHER; note = 2'-O-methyladenosine-3'-phosphate
  modified_base 18: mod_base = OTHER; note = 2'-O-methyladenosine-3'-phosphate
  modified_base 19: mod_base = OTHER; note = 2'-O-methylcytidine-3'-phosphate
  modified_base 20: mod_base = OTHER; note = 2'-O-methyluridine-3'-phosphate
  modified_base 21: mod_base = OTHER; note = 2'-O-methyladenosine-3'-phosphate attached to N-[tris(N-acetylgalactosamine-alkyl)-amidodecanoyl)]-4-hydr oxyprolinol (Hyp-(GalNAc-alkyl)3)
gatagttttcatccataacta

SEQ ID NO: 223 - RNA, 21 nt, synthetic construct
  misc_feature 1..21: note = Description of Artificial Sequence: Synthetic oligonucleotide
  source 1..21: mol_type = other RNA
  modified_base 1: mod_base = OTHER; note = 2'-O-methyluridine-3'-phosphorothioate
  modified_base 2: mod_base = OTHER; note = 2'-O-methylcytidine-3'-phosphorothioate
  modified_base 3: mod_base = OTHER; note = 2'-O-methyladenosine-3'-phosphate
  modified_base 4: mod_base = OTHER; note = 2'-O-methylcytidine-3'-phosphate
  modified_base 5: mod_base = OTHER; note = 2'-O-methyladenosine-3'-phosphate
  modified_base 6: mod_base = OTHER; note = 2'-O-methyluridine-3'-phosphate
  modified_base 7: mod_base = OTHER; note = 2'-fluoroadenosine-3'-phosphate
  modified_base 8: mod_base = OTHER; note = 2'-O-methylguanosine-3'-phosphate
  modified_base 9: mod_base = OTHER; note = 2'-fluorocytidine-3'-phosphate
  modified_base 10: mod_base = OTHER; note = 2'-fluorocytidine-3'-phosphate
  modified_base 11: mod_base = OTHER; note = 2'-fluorocytidine-3'-phosphate
  modified_base 12: mod_base = OTHER; note = 2'-O-methyladenosine-3'-phosphate
  modified_base 13: mod_base = OTHER; note = 2'-O-methylcytidine-3'-phosphate
  modified_base 14: mod_base = OTHER; note = 2'-O-methyluridine-3'-phosphate
  modified_base 15: mod_base = OTHER; note = 2'-O-methyluridine-3'-phosphate
  modified_base 16: mod_base = OTHER; note = 2'-O-methyladenosine-3'-phosphate
  modified_base 17: mod_base = OTHER; note = 2'-O-methylcytidine-3'-phosphate
  modified_base 18: mod_base = OTHER; note = 2'-O-methyladenosine-3'-phosphate
  modified_base 19: mod_base = OTHER; note = 2'-O-methyluridine-3'-phosphate
  modified_base 20: mod_base = OTHER; note = 2'-O-methyluridine-3'-phosphate
  modified_base 21: mod_base = OTHER; note = 2'-O-methyluridine-3'-phosphate attached to N-[tris(N-acetylgalactosamine-alkyl)-amidodecanoyl)]-4-hydr oxyprolinol (Hyp-(GalNAc-alkyl)3)
tcacatagcccacttacattt

SEQ ID NO: 224 - RNA, 21 nt, synthetic construct
  misc_feature 1..21: note = Description of Artificial Sequence: Synthetic oligonucleotide
  source 1..21: mol_type = other RNA
  modified_base 1: mod_base = OTHER; note = 2'-O-methyluridine-3'-phosphorothioate
  modified_base 2: mod_base = OTHER; note = 2'-O-methyluridine-3'-phosphorothioate
  modified_base 3: mod_base = OTHER; note = 2'-O-methyladenosine-3'-phosphate
  modified_base 4: mod_base = OTHER; note = 2'-O-methylcytidine-3'-phosphate
  modified_base 5: mod_base = OTHER; note = 2'-O-methyladenosine-3'-phosphate
  modified_base 6: mod_base = OTHER; note = 2'-O-methyluridine-3'-phosphate
  modified_base 7: mod_base = OTHER; note = 2'-fluoroguanosine-3'-phosphate
  modified_base 8: mod_base = OTHER; note = 2'-O-methyladenosine-3'-phosphate
  modified_base 9: mod_base = OTHER; note = 2'-fluoroguanosine-3'-phosphate
  modified_base 10: mod_base = OTHER; note = 2'-fluoroguanosine-3'-phosphate
  modified_base 11: mod_base = OTHER; note = 2'-fluoroadenosine-3'-phosphate
  modified_base 12: mod_base = OTHER; note = 2'-O-methylcytidine-3'-phosphate
  modified_base 13: mod_base = OTHER; note = 2'-O-methyluridine-3'-phosphate
  modified_base 14: mod_base = OTHER; note = 2'-O-methylcytidine-3'-phosphate
  modified_base 15: mod_base = OTHER; note = 2'-O-methyluridine-3'-phosphate
  modified_base 16: mod_base = OTHER; note = 2'-O-methyladenosine-3'-phosphate
  modified_base 17: mod_base = OTHER; note = 2'-O-methyluridine-3'-phosphate
  modified_base 18: mod_base = OTHER; note = 2'-O-methyluridine-3'-phosphate
  modified_base 19: mod_base = OTHER; note = 2'-O-methylcytidine-3'-phosphate
  modified_base 20: mod_base = OTHER; note = 2'-O-methyluridine-3'-phosphate
  modified_base 21: mod_base = OTHER; note = 2'-O-methyluridine-3'-phosphate attached to N-[tris(N-acetylgalactosamine-alkyl)-amidodecanoyl)]-4-hydr oxyprolinol (Hyp-(GalNAc-alkyl)3)
ttacatgaggactctattctt

SEQ ID NO: 225 - RNA, 21 nt, synthetic construct
  misc_feature 1..21: note = Description of Artificial Sequence: Synthetic oligonucleotide
  source 1..21: mol_type = other RNA
  modified_base 1: mod_base = OTHER; note = 2'-O-methylcytidine-3'-phosphorothioate
  modified_base 2: mod_base = OTHER; note = 2'-O-methyluridine-3'-phosphorothioate
  modified_base 3: mod_base = OTHER; note = 2'-O-methylguanosine-3'-phosphate
  modified_base 4: mod_base = OTHER; note = 2'-O-methylguanosine-3'-phosphate
  modified_base 5: mod_base = OTHER; note = 2'-O-methylcytidine-3'-phosphate
  modified_base 6: mod_base = OTHER; note = 2'-O-methyluridine-3'-phosphate
  modified_base 7: mod_base = OTHER; note = 2'-fluoroadenosine-3'-phosphate
  modified_base 8: mod_base = OTHER; note = 2'-O-methyluridine-3'-phosphate
  modified_base 9: mod_base = OTHER; note = 2'-fluoroadenosine-3'-phosphate
  modified_base 10: mod_base = OTHER; note = 2'-fluoroguanosine-3'-phosphate
  modified_base 11: mod_base = OTHER; note = 2'-fluoroadenosine-3'-phosphate
  modified_base 12: mod_base = OTHER; note = 2'-O-methyluridine-3'-phosphate
  modified_base 13: mod_base = OTHER; note = 2'-O-methylguanosine-3'-phosphate
  modified_base 14: mod_base = OTHER; note = 2'-O-methyluridine-3'-phosphate
  modified_base 15: mod_base = OTHER; note = 2'-O-methylcytidine-3'-phosphate
  modified_base 16: mod_base = OTHER; note = 2'-O-methyluridine-3'-phosphate
  modified_base 17: mod_base = OTHER; note = 2'-O-methyluridine-3'-phosphate
  modified_base 18: mod_base = OTHER; note = 2'-O-methyluridine-3'-phosphate
  modified_base 19: mod_base = OTHER; note = 2'-O-methyluridine-3'-phosphate
  modified_base 20: mod_base = OTHER; note = 2'-O-methylcytidine-3'-phosphate
  modified_base 21: mod_base = OTHER; note = 2'-O-methyladenosine-3'-phosphate attached to N-[tris(N-acetylgalactosamine-alkyl)-amidodecanoyl)]-4-hydr oxyprolinol (Hyp-(GalNAc-alkyl)3)
ctggctatagatgtcttttca

SEQ ID NO: 226 - RNA, 21 nt, synthetic construct
  misc_feature 1..21: note = Description of Artificial Sequence: Synthetic oligonucleotide
  source 1..21: mol_type = other RNA
  modified_base 1: mod_base = OTHER; note = 2'-O-methyluridine-3'-phosphorothioate
  modified_base 2: mod_base = OTHER; note = 2'-O-methyluridine-3'-phosphorothioate
  modified_base 3: mod_base = OTHER; note = 2'-O-methyluridine-3'-phosphate
  modified_base 4: mod_base = OTHER; note = 2'-O-methylcytidine-3'-phosphate
  modified_base 5: mod_base = OTHER; note = 2'-O-methylguanosine-3'-phosphate
  modified_base 6: mod_base = OTHER; note = 2'-O-methyladenosine-3'-phosphate
  modified_base 7: mod_base = OTHER; note = 2'-fluoroguanosine-3'-phosphate
  modified_base 8: mod_base = OTHER; note = 2'-O-methyladenosine-3'-phosphate
  modified_base 9: mod_base = OTHER; note = 2'-fluorouridine-3'-phosphate
  modified_base 10: mod_base = OTHER; note = 2'-fluorouridine-3'-phosphate
  modified_base 11: mod_base = OTHER; note = 2'-fluoroadenosine-3'-phosphate
  modified_base 12: mod_base = OTHER; note = 2'-O-methyluridine-3'-phosphate
  modified_base 13: mod_base = OTHER; note = 2'-O-methylcytidine-3'-phosphate
  modified_base 14: mod_base = OTHER; note = 2'-O-methylguanosine-3'-phosphate
  modified_base 15: mod_base = OTHER; note = 2'-O-methyluridine-3'-phosphate
  modified_base 16: mod_base = OTHER; note = 2'-O-methyluridine-3'-phosphate
  modified_base 17: mod_base = OTHER; note = 2'-O-methyluridine-3'-phosphate
  modified_base 18: mod_base = OTHER; note = 2'-O-methyluridine-3'-phosphate
  modified_base 19: mod_base = OTHER; note = 2'-O-methylcytidine-3'-phosphate
  modified_base 20: mod_base = OTHER; note = 2'-O-methyluridine-3'-phosphate
  modified_base 21: mod_base = OTHER; note = 2'-O-methyluridine-3'-phosphate attached to N-[tris(N-acetylgalactosamine-alkyl)-amidodecanoyl)]-4-hydr oxyprolinol (Hyp-(GalNAc-alkyl)3)
tttcgagattatcgttttctt

SEQ ID NO: 227 - RNA, 21 nt, synthetic construct
  misc_feature 1..21: note = Description of Artificial Sequence: Synthetic oligonucleotide
  source 1..21: mol_type = other RNA
  modified_base 1: mod_base = OTHER; note = 2'-O-methyluridine-3'-phosphorothioate
  modified_base 2: mod_base = OTHER; note = 2'-O-methyluridine-3'-phosphorothioate
  modified_base 3: mod_base = OTHER; note = 2'-O-methylcytidine-3'-phosphate
  modified_base 4: mod_base = OTHER; note = 2'-O-methyluridine-3'-phosphate
  modified_base 5: mod_base = OTHER; note = 2'-O-methyluridine-3'-phosphate
  modified_base 6: mod_base = OTHER; note = 2'-O-methylguanosine-3'-phosphate
  modified_base 7: mod_base = OTHER; note = 2'-fluorouridine-3'-phosphate
  modified_base 8: mod_base = OTHER; note = 2'-O-methyladenosine-3'-phosphate
  modified_base 9: mod_base = OTHER; note = 2'-fluoroadenosine-3'-phosphate
  modified_base 10: mod_base = OTHER; note = 2'-fluorouridine-3'-phosphate
  modified_base 11: mod_base = OTHER; note = 2'-fluorouridine-3'-phosphate
  modified_base 12: mod_base = OTHER; note = 2'-O-methyluridine-3'-phosphate
  modified_base 13: mod_base = OTHER; note = 2'-O-methyluridine-3'-phosphate
  modified_base 14: mod_base = OTHER; note = 2'-O-methyladenosine-3'-phosphate
  modified_base 15: mod_base = OTHER; note = 2'-O-methylcytidine-3'-phosphate
  modified_base 16: mod_base = OTHER; note = 2'-O-methyladenosine-3'-phosphate
  modified_base 17: mod_base = OTHER; note = 2'-O-methylcytidine-3'-phosphate
  modified_base 18: mod_base = OTHER; note = 2'-O-methylguanosine-3'-phosphate
  modified_base 19: mod_base = OTHER; note = 2'-O-methylcytidine-3'-phosphate
  modified_base 20: mod_base = OTHER; note = 2'-O-methyluridine-3'-phosphate
  modified_base 21: mod_base = OTHER; note = 2'-O-methyluridine-3'-phosphate attached to N-[tris(N-acetylgalactosamine-alkyl)-amidodecanoyl)]-4-hydr oxyprolinol (Hyp-(GalNAc-alkyl)3)
ttcttgtaattttacacgctt

SEQ ID NO: 228 - RNA, 21 nt, synthetic construct
  misc_feature 1..21: note = Description of Artificial Sequence: Synthetic oligonucleotide
  source 1..21: mol_type = other RNA
  modified_base 1: mod_base = OTHER; note = 2'-O-methyladenosine-3'-phosphorothioate
  modified_base 2: mod_base = OTHER; note = 2'-O-methylguanosine-3'-phosphorothioate
  modified_base 3: mod_base = OTHER; note = 2'-O-methyluridine-3'-phosphate
  modified_base 4: mod_base = OTHER; note = 2'-O-methyluridine-3'-phosphate
  modified_base 5: mod_base = OTHER; note = 2'-O-methyladenosine-3'-phosphate
  modified_base 6: mod_base = OTHER; note = 2'-O-methyladenosine-3'-phosphate
  modified_base 7: mod_base = OTHER; note = 2'-fluorocytidine-3'-phosphate
  modified_base 8: mod_base = OTHER; note = 2'-O-methyladenosine-3'-phosphate
  modified_base 9: mod_base = OTHER; note = 2'-fluorocytidine-3'-phosphate
  modified_base 10: mod_base = OTHER; note = 2'-fluoroadenosine-3'-phosphate
  modified_base 11: mod_base = OTHER; note = 2'-fluorocytidine-3'-phosphate
  modified_base 12: mod_base = OTHER; note = 2'-O-methyluridine-3'-phosphate
  modified_base 13: mod_base = OTHER; note = 2'-O-methyladenosine-3'-phosphate
  modified_base 14: mod_base = OTHER; note = 2'-O-methylcytidine-3'-phosphate
  modified_base 15: mod_base = OTHER; note = 2'-O-methylcytidine-3'-phosphate
  modified_base 16: mod_base = OTHER; note = 2'-O-methylguanosine-3'-phosphate
  modified_base 17: mod_base = OTHER; note = 2'-O-methyladenosine-3'-phosphate
  modified_base 18: mod_base = OTHER; note = 2'-O-methyladenosine-3'-phosphate
  modified_base 19: mod_base = OTHER; note = 2'-O-methyluridine-3'-phosphate
  modified_base 20: mod_base = OTHER; note = 2'-O-methylguanosine-3'-phosphate
  modified_base 21: mod_base = OTHER; note = 2'-O-methyluridine-3'-phosphate attached to N-[tris(N-acetylgalactosamine-alkyl)-amidodecanoyl)]-4-hydr oxyprolinol (Hyp-(GalNAc-alkyl)3)
agttaacacactaccgaatgt

SEQ ID NO: 229 - RNA, 21 nt, synthetic construct
  misc_feature 1..21: note = Description of Artificial Sequence: Synthetic oligonucleotide
  source 1..21: mol_type = other RNA
  modified_base 1: mod_base = OTHER; note = 2'-O-methyladenosine-3'-phosphorothioate
  modified_base 2: mod_base = OTHER; note = 2'-O-methyladenosine-3'-phosphorothioate
  modified_base 3: mod_base = OTHER; note = 2'-O-methylguanosine-3'-phosphate
  modified_base 4: mod_base = OTHER; note = 2'-O-methyluridine-3'-phosphate
  modified_base 5: mod_base = OTHER; note = 2'-O-methyluridine-3'-phosphate
  modified_base 6: mod_base = OTHER; note = 2'-O-methyladenosine-3'-phosphate
  modified_base 7: mod_base = OTHER; note = 2'-fluoroadenosine-3'-phosphate
  modified_base 8: mod_base = OTHER; note = 2'-O-methylguanosine-3'-phosphate
  modified_base 9: mod_base = OTHER; note = 2'-fluorouridine-3'-phosphate
  modified_base 10: mod_base = OTHER; note = 2'-fluorouridine-3'-phosphate
  modified_base 11: mod_base = OTHER; note = 2'-fluoroguanosine-3'-phosphate
  modified_base 12: mod_base = OTHER; note = 2'-O-methyladenosine-3'-phosphate
  modified_base 13: mod_base = OTHER; note = 2'-O-methylguanosine-3'-phosphate
  modified_base 14: mod_base = OTHER; note = 2'-O-methyladenosine-3'-phosphate
  modified_base 15: mod_base = OTHER; note = 2'-O-methyluridine-3'-phosphate
  modified_base 16: mod_base = OTHER; note = 2'-O-methyladenosine-3'-phosphate
  modified_base 17: mod_base = OTHER; note = 2'-O-methylguanosine-3'-phosphate
  modified_base 18: mod_base = OTHER; note = 2'-O-methyluridine-3'-phosphate
  modified_base 19: mod_base = OTHER; note = 2'-O-methyluridine-3'-phosphate
  modified_base 20: mod_base = OTHER; note = 2'-O-methyluridine-3'-phosphate
  modified_base 21: mod_base = OTHER; note = 2'-O-methyluridine-3'-phosphate attached to N-[tris(N-acetylgalactosamine-alkyl)-amidodecanoyl)]-4-hydr oxyprolinol (Hyp-(GalNAc-alkyl)3)
aagttaagttgagatagtttt

SEQ ID NO: 230 - RNA, 21 nt, synthetic construct
  misc_feature 1..21: note = Description of Artificial Sequence: Synthetic oligonucleotide
  source 1..21: mol_type = other RNA
  modified_base 1: mod_base = OTHER; note = 2'-O-methyladenosine-3'-phosphorothioate
  modified_base 2: mod_base = OTHER; note = 2'-O-methyladenosine-3'-phosphorothioate
  modified_base 3: mod_base = OTHER; note = 2'-O-methylguanosine-3'-phosphate
  modified_base 4: mod_base = OTHER; note = 2'-O-methylcytidine-3'-phosphate
  modified_base 5: mod_base = OTHER; note = 2'-O-methyladenosine-3'-phosphate
  modified_base 6: mod_base = OTHER; note = 2'-O-methyluridine-3'-phosphate
  modified_base 7: mod_base = OTHER; note = 2'-fluoroguanosine-3'-phosphate
  modified_base 8: mod_base = OTHER; note = 2'-O-methylguanosine-3'-phosphate
  modified_base 9: mod_base = OTHER; note = 2'-fluoroguanosine-3'-phosphate
  modified_base 10: mod_base = OTHER; note = 2'-fluoroadenosine-3'-phosphate
  modified_base 11: mod_base = OTHER; note = 2'-fluorouridine-3'-phosphate
  modified_base 12: mod_base = OTHER; note = 2'-O-methyluridine-3'-phosphate
  modified_base 13: mod_base = OTHER; note = 2'-O-methyladenosine-3'-phosphate
  modified_base 14: mod_base = OTHER; note = 2'-O-methyluridine-3'-phosphate
  modified_base 15: mod_base = OTHER; note = 2'-O-methyluridine-3'-phosphate
  modified_base 16: mod_base = OTHER; note = 2'-O-methyladenosine-3'-phosphate
  modified_base 17: mod_base = OTHER; note = 2'-O-methylguanosine-3'-phosphate
  modified_base 18: mod_base = OTHER; note = 2'-O-methyladenosine-3'-phosphate
  modified_base 19: mod_base = OTHER; note = 2'-O-methyladenosine-3'-phosphate
  modified_base 20: mod_base = OTHER; note = 2'-O-methyluridine-3'-phosphate
  modified_base 21: mod_base = OTHER; note = 2'-O-methyladenosine-3'-phosphate attached to N-[tris(N-acetylgalactosamine-alkyl)-amidodecanoyl)]-4-hydr oxyprolinol (Hyp-(GalNAc-alkyl)3)
aagcatgggattattagaata

SEQ ID NO: 231 - RNA, 21 nt, synthetic construct
  misc_feature 1..21: note = Description of Artificial Sequence: Synthetic oligonucleotide
  source 1..21: mol_type = other RNA
  modified_base 1: mod_base = OTHER; note = 2'-O-methylcytidine-3'-phosphorothioate
  modified_base 2: mod_base = OTHER; note = 2'-O-methyluridine-3'-phosphorothioate
  modified_base 3: mod_base = OTHER; note = 2'-O-methylcytidine-3'-phosphate
  modified_base 4: mod_base = OTHER; note = 2'-O-methyluridine-3'-phosphate
  modified_base 5: mod_base = OTHER; note = 2'-O-methyladenosine-3'-phosphate
  modified_base 6: mod_base = OTHER; note = 2'-O-methyluridine-3'-phosphate
  modified_base 7: mod_base = OTHER; note = 2'-fluorouridine-3'-phosphate
  modified_base 8: mod_base = OTHER; note = 2'-O-methylcytidine-3'-phosphate
  modified_base 9: mod_base = OTHER; note = 2'-fluorouridine-3'-phosphate
  modified_base 10: mod_base = OTHER; note = 2'-fluorouridine-3'-phosphate
  modified_base 11: mod_base = OTHER; note = 2'-fluorouridine-3'-phosphate
  modified_base 12: mod_base = OTHER; note = 2'-O-methyladenosine-3'-phosphate
  modified_base 13: mod_base = OTHER; note = 2'-O-methyladenosine-3'-phosphate
  modified_base 14: mod_base = OTHER; note = 2'-O-methylcytidine-3'-phosphate
  modified_base 15: mod_base = OTHER; note = 2'-O-methyluridine-3'-phosphate
  modified_base 16: mod_base = OTHER; note = 2'-O-methylcytidine-3'-phosphate
  modified_base 17: mod_base = OTHER; note = 2'-O-methylcytidine-3'-phosphate
  modified_base 18: mod_base = OTHER; note = 2'-O-methylcytidine-3'-phosphate
  modified_base 19: mod_base = OTHER; note = 2'-O-methyladenosine-3'-phosphate
  modified_base 20: mod_base = OTHER; note = 2'-O-methyluridine-3'-phosphate
  modified_base 21: mod_base = OTHER; note = 2'-O-methyluridine-3'-phosphate attached to N-[tris(N-acetylgalactosamine-alkyl)-amidodecanoyl)]-4-hydr oxyprolinol (Hyp-(GalNAc-alkyl)3)
ctctattctttaactcccatt

SEQ ID NO: 232 - RNA, 21 nt, synthetic construct
  misc_feature 1..21: note = Description of Artificial Sequence: Synthetic oligonucleotide
  source 1..21: mol_type = other RNA
  modified_base 1: mod_base = OTHER; note = 2'-O-methyluridine-3'-phosphorothioate
  modified_base 2: mod_base = OTHER; note = 2'-O-methylcytidine-3'-phosphorothioate
  modified_base 3: mod_base = OTHER; note = 2'-O-methyluridine-3'-phosphate
  modified_base 4: mod_base = OTHER; note = 2'-O-methyluridine-3'-phosphate
  modified_base 5: mod_base = OTHER; note = 2'-O-methylguanosine-3'-phosphate
  modified_base 6: mod_base = OTHER; note = 2'-O-methyluridine-3'-phosphate
  modified_base 7: mod_base = OTHER; note = 2'-fluoroadenosine-3'-phosphate
  modified_base 8: mod_base = OTHER; note = 2'-O-methyladenosine-3'-phosphate
  modified_base 9: mod_base = OTHER; note = 2'-fluorouridine-3'-phosphate
  modified_base 10: mod_base = OTHER; note = 2'-fluorouridine-3'-phosphate
  modified_base 11: mod_base = OTHER; note = 2'-fluorouridine-3'-phosphate
  modified_base 12: mod_base = OTHER; note = 2'-O-methyluridine-3'-phosphate
  modified_base 13: mod_base = OTHER; note = 2'-O-methyladenosine-3'-phosphate
  modified_base 14: mod_base = OTHER; note = 2'-O-methylcytidine-3'-phosphate
  modified_base 15: mod_base = OTHER; note = 2'-O-methyladenosine-3'-phosphate
  modified_base 16: mod_base = OTHER; note = 2'-O-methylcytidine-3'-phosphate
  modified_base 17: mod_base = OTHER; note = 2'-O-methylguanosine-3'-phosphate
  modified_base 18: mod_base = OTHER; note = 2'-O-methylcytidine-3'-phosphate
  modified_base 19: mod_base = OTHER; note = 2'-O-methyluridine-3'-phosphate
  modified_base 20: mod_base = OTHER; note = 2'-O-methyluridine-3'-phosphate
  modified_base 21: mod_base = OTHER; note = 2'-O-methyluridine-3'-phosphate attached to N-[tris(N-acetylgalactosamine-alkyl)-amidodecanoyl)]-4-hydr oxyprolinol (Hyp-(GalNAc-alkyl)3)
tcttgtaattttacacgcttt

SEQ ID NO: 233 - RNA, 21 nt, synthetic construct
  misc_feature 1..21: note = Description of Artificial Sequence: Synthetic oligonucleotide
  source 1..21: mol_type = other RNA
  modified_base 1: mod_base = OTHER; note = 2'-O-methyluridine-3'-phosphorothioate
  modified_base 2: mod_base = OTHER; note = 2'-O-methyladenosine-3'-phosphorothioate
  modified_base 3: mod_base = OTHER; note = 2'-O-methylguanosine-3'-phosphate
  modified_base 4: mod_base = OTHER; note = 2'-O-methyluridine-3'-phosphate
  modified_base 5: mod_base = OTHER; note = 2'-O-methyluridine-3'-phosphate
  modified_base 6: mod_base = OTHER; note = 2'-O-methyladenosine-3'-phosphate
  modified_base 7: mod_base = OTHER; note = 2'-fluoroadenosine-3'-phosphate
  modified_base 8: mod_base = OTHER; note = 2'-O-methylcytidine-3'-phosphate
  modified_base 9: mod_base = OTHER; note = 2'-fluoroadenosine-3'-phosphate
  modified_base 10: mod_base = OTHER; note = 2'-fluorocytidine-3'-phosphate
  modified_base 11: mod_base = OTHER; note = 2'-fluoroadenosine-3'-phosphate
  modified_base 12: mod_base = OTHER; note = 2'-O-methylcytidine-3'-phosphate
  modified_base 13: mod_base = OTHER; note = 2'-O-methyluridine-3'-phosphate
  modified_base 14: mod_base = OTHER; note = 2'-O-methyladenosine-3'-phosphate
  modified_base 15: mod_base = OTHER; note = 2'-O-methylcytidine-3'-phosphate
  modified_base 16: mod_base = OTHER; note = 2'-O-methylcytidine-3'-phosphate
  modified_base 17: mod_base = OTHER; note = 2'-O-methylguanosine-3'-phosphate
  modified_base 18: mod_base = OTHER; note = 2'-O-methyladenosine-3'-phosphate
  modified_base 19: mod_base = OTHER; note = 2'-O-methyladenosine-3'-phosphate
  modified_base 20: mod_base = OTHER; note = 2'-O-methyluridine-3'-phosphate
  modified_base 21: mod_base = OTHER; note = 2'-O-methyladenosine-3'-phosphate attached to N-[tris(N-acetylgalactosamine-alkyl)-amidodecanoyl)]-4-hydr oxyprolinol (Hyp-(GalNAc-alkyl)3)
tagttaacacactaccgaata

SEQ ID NO: 234 - RNA, 21 nt, synthetic construct
  misc_feature 1..21: note = Description of Artificial Sequence: Synthetic oligonucleotide
  source 1..21: mol_type = other RNA
  modified_base 1: mod_base = OTHER; note = 2'-O-methylguanosine-3'-phosphorothioate
  modified_base 2: mod_base = OTHER; note = 2'-O-methyluridine-3'-phosphorothioate
  modified_base 3: mod_base = OTHER; note = 2'-O-methyluridine-3'-phosphate
  modified_base 4: mod_base = OTHER; note = 2'-O-methyladenosine-3'-phosphate
  modified_base 5: mod_base = OTHER; note = 2'-O-methyladenosine-3'-phosphate
  modified_base 6: mod_base = OTHER; note = 2'-O-methylcytidine-3'-phosphate
  modified_base 7: mod_base = OTHER; note = 2'-fluoroadenosine-3'-phosphate
  modified_base 8: mod_base = OTHER; note = 2'-O-methylcytidine-3'-phosphate
  modified_base 9: mod_base = OTHER; note = 2'-fluoroadenosine-3'-phosphate
  modified_base 10: mod_base = OTHER; note = 2'-fluorocytidine-3'-phosphate
  modified_base 11: mod_base = OTHER; note = 2'-fluorouridine-3'-phosphate
  modified_base 12: mod_base = OTHER; note = 2'-O-methyladenosine-3'-phosphate
  modified_base 13: mod_base = OTHER; note = 2'-O-methylcytidine-3'-phosphate
  modified_base 14: mod_base = OTHER; note = 2'-O-methylcytidine-3'-phosphate
  modified_base 15: mod_base = OTHER; note = 2'-O-methylguanosine-3'-phosphate
  modified_base 16: mod_base = OTHER; note = 2'-O-methyladenosine-3'-phosphate
  modified_base 17: mod_base = OTHER; note = 2'-O-methyladenosine-3'-phosphate
  modified_base 18: mod_base = OTHER; note = 2'-O-methyluridine-3'-phosphate
  modified_base 19: mod_base = OTHER; note = 2'-O-methylguanosine-3'-phosphate
  modified_base 20: mod_base = OTHER; note = 2'-O-methyluridine-3'-phosphate
  modified_base 21: mod_base = OTHER; note = 2'-O-methyladenosine-3'-phosphate attached to N-[tris(N-acetylgalactosamine-alkyl)-amidodecanoyl)]-4-hydr oxyprolinol (Hyp-(GalNAc-alkyl)3)
gttaacacactaccgaatgta

SEQ ID NO: 235 - RNA, 21 nt, synthetic construct
  misc_feature 1..21: note = Description of Artificial Sequence: Synthetic oligonucleotide
  source 1..21: mol_type = other RNA
  modified_base 1: mod_base = OTHER; note = 2'-O-methylcytidine-3'-phosphorothioate
  modified_base 2: mod_base = OTHER; note = 2'-O-methyluridine-3'-phosphorothioate
  modified_base 3: mod_base = OTHER; note = 2'-O-methylcytidine-3'-phosphate
  modified_base 4: mod_base = OTHER; note = 2'-O-methyluridine-3'-phosphate
  modified_base 5: mod_base = OTHER; note = 2'-O-methylguanosine-3'-phosphate
  modified_base 6: mod_base = OTHER; note = 2'-O-methyladenosine-3'-phosphate
  modified_base 7: mod_base = OTHER; note = 2'-fluorouridine-3'-phosphate
  modified_base 8: mod_base = OTHER; note = 2'-O-methylguanosine-3'-phosphate
  modified_base 9: mod_base = OTHER; note = 2'-fluorocytidine-3'-phosphate
  modified_base 10: mod_base = OTHER; note = 2'-fluoroadenosine-3'-phosphate
  modified_base 11: mod_base = OTHER; note = 2'-fluoroguanosine-3'-phosphate
  modified_base 12: mod_base = OTHER; note = 2'-O-methylcytidine-3'-phosphate
  modified_base 13: mod_base = OTHER; note = 2'-O-methyluridine-3'-phosphate
  modified_base 14: mod_base = OTHER; note = 2'-O-methyluridine-3'-phosphate
  modified_base 15: mod_base = OTHER; note = 2'-O-methyladenosine-3'-phosphate
  modified_base 16: mod_base = OTHER; note = 2'-O-methyluridine-3'-phosphate
  modified_base 17: mod_base = OTHER; note = 2'-O-methyladenosine-3'-phosphate
  modified_base 18: mod_base = OTHER; note = 2'-O-methylcytidine-3'-phosphate
  modified_base 19: mod_base = OTHER; note = 2'-O-methylguanosine-3'-phosphate
  modified_base 20: mod_base = OTHER; note = 2'-O-methyladenosine-3'-phosphate
  modified_base 21: mod_base = OTHER; note = 2'-O-methyladenosine-3'-phosphate attached to N-[tris(N-acetylgalactosamine-alkyl)-amidodecanoyl)]-4-hydr oxyprolinol (Hyp-(GalNAc-alkyl)3)
ctctgatgcagcttatacgaa

SEQ ID NO: 236 - RNA, 21 nt, synthetic construct
  misc_feature 1..21: note = Description of Artificial Sequence: Synthetic oligonucleotide
  source 1..21: mol_type = other RNA
  modified_base 1: mod_base = OTHER; note = 2'-O-methyluridine-3'-phosphorothioate
  modified_base 2: mod_base = OTHER; note = 2'-O-methyluridine-3'-phosphorothioate
  modified_base 3: mod_base = OTHER; note = 2'-O-methyluridine-3'-phosphate
  modified_base 4: mod_base = OTHER; note = 2'-O-methylguanosine-3'-phosphate
  modified_base 5: mod_base = OTHER; note = 2'-O-methyluridine-3'-phosphate
  modified_base 6: mod_base = OTHER; note = 2'-O-methylcytidine-3'-phosphate
  modified_base 7: mod_base = OTHER; note = 2'-fluorouridine-3'-phosphate
  modified_base 8: mod_base = OTHER; note = 2'-O-methyladenosine-3'-phosphate
  modified_base 9: mod_base = OTHER; note = 2'-fluorocytidine-3'-phosphate
  modified_base 10: mod_base = OTHER; note = 2'-fluoroadenosine-3'-phosphate
  modified_base 11: mod_base = OTHER; note = 2'-fluorocytidine-3'-phosphate
  modified_base 12: mod_base = OTHER; note = 2'-O-methyladenosine-3'-phosphate
  modified_base 13: mod_base = OTHER; note = 2'-O-methylcytidine-3'-phosphate
  modified_base 14: mod_base = OTHER; note = 2'-O-methylcytidine-3'-phosphate
  modified_base 15: mod_base = OTHER; note = 2'-O-methylcytidine-3'-phosphate
  modified_base 16: mod_base = OTHER; note = 2'-O-methyluridine-3'-phosphate
  modified_base 17: mod_base = OTHER; note = 2'-O-methylguanosine-3'-phosphate
  modified_base 18: mod_base = OTHER; note = 2'-O-methylcytidine-3'-phosphate
  modified_base 19: mod_base = OTHER; note = 2'-O-methyladenosine-3'-phosphate
  modified_base 20: mod_base = OTHER; note = 2'-O-methyluridine-3'-phosphate
  modified_base 21: mod_base = OTHER; note = 2'-O-methyladenosine-3'-phosphate attached to N-[tris(N-acetylgalactosamine-alkyl)-amidodecanoyl)]-4-hydr oxyprolinol (Hyp-(GalNAc-alkyl)3)
tttgtctacacaccctgcata

SEQ ID NO: 237 - RNA, 21 nt, synthetic construct
  misc_feature 1..21: note = Description of Artificial Sequence: Synthetic oligonucleotide
  source 1..21: mol_type = other RNA
  modified_base 1: mod_base = OTHER; note = 2'-O-methyladenosine-3'-phosphorothioate
  modified_base 2: mod_base = OTHER; note = 2'-O-methylguanosine-3'-phosphorothioate
  modified_base 3: mod_base = OTHER; note = 2'-O-methyladenosine-3'-phosphate
  modified_base 4: mod_base = OTHER; note = 2'-O-methyluridine-3'-phosphate
  modified_base 5: mod_base = OTHER; note = 2'-O-methyladenosine-3'-phosphate
  modified_base 6: mod_base = OTHER; note = 2'-O-methylguanosine-3'-phosphate
  modified_base 7: mod_base = OTHER; note = 2'-fluorouridine-3'-phosphate
  modified_base 8: mod_base = OTHER; note = 2'-O-methyluridine-3'-phosphate
  modified_base 9: mod_base = OTHER; note = 2'-fluorouridine-3'-phosphate
  modified_base 10: mod_base = OTHER; note = 2'-fluorouridine-3'-phosphate
  modified_base 11: mod_base = OTHER; note = 2'-fluorocytidine-3'-phosphate
  modified_base 12: mod_base = OTHER; note = 2'-O-methyladenosine-3'-phosphate
  modified_base 13: mod_base = OTHER; note = 2'-O-methyluridine-3'-phosphate
  modified_base 14: mod_base = OTHER; note = 2'-O-methylcytidine-3'-phosphate
  modified_base 15: mod_base = OTHER; note = 2'-O-methylcytidine-3'-phosphate
  modified_base 16: mod_base = OTHER; note = 2'-O-methyladenosine-3'-phosphate
  modified_base 17: mod_base = OTHER; note = 2'-O-methyluridine-3'-phosphate
  modified_base 18: mod_base = OTHER; note = 2'-O-methyladenosine-3'-phosphate
  modified_base 19: mod_base = OTHER; note = 2'-O-methyladenosine-3'-phosphate
  modified_base 20: mod_base = OTHER; note = 2'-O-methylcytidine-3'-phosphate
  modified_base 21: mod_base = OTHER; note = 2'-O-methyluridine-3'-phosphate attached to N-[tris(N-acetylgalactosamine-alkyl)-amidodecanoyl)]-4-hydr oxyprolinol (Hyp-(GalNAc-alkyl)3)
agatagttttcatccataact

SEQ ID NO: 238 - RNA, 21 nt, synthetic construct
  misc_feature 1..21: note = Description of Artificial Sequence: Synthetic oligonucleotide
  source 1..21: mol_type = other RNA
  modified_base 1: mod_base = OTHER; note = 2'-O-methyluridine-3'-phosphorothioate
  modified_base 2: mod_base = OTHER; note = 2'-O-methyladenosine-3'-phosphorothioate
  modified_base 3: mod_base = OTHER; note = 2'-O-methylcytidine-3'-phosphate
  modified_base 4: mod_base = OTHER; note = 2'-O-methyluridine-3'-phosphate
  modified_base 5: mod_base = OTHER; note = 2'-O-methylcytidine-3'-phosphate
  modified_base 6: mod_base = OTHER; note = 2'-O-methyladenosine-3'-phosphate
  modified_base 7: mod_base = OTHER; note = 2'-fluoroadenosine-3'-phosphate
  modified_base 8: mod_base = OTHER; note = 2'-O-methyladenosine-3'-phosphate
  modified_base 9: mod_base = OTHER; note = 2'-fluoroguanosine-3'-phosphate
  modified_base 10: mod_base = OTHER; note = 2'-fluorocytidine-3'-phosphate
  modified_base 11: mod_base = OTHER; note = 2'-fluoroadenosine-3'-phosphate
  modified_base 12: mod_base = OTHER; note = 2'-O-methyluridine-3'-phosphate
  modified_base 13: mod_base = OTHER; note = 2'-O-methylguanosine-3'-phosphate
  modified_base 14: mod_base = OTHER; note = 2'-O-methylguanosine-3'-phosphate
  modified_base 15: mod_base = OTHER; note = 2'-O-methylguanosine-3'-phosphate
  modified_base 16: mod_base = OTHER; note = 2'-O-methyladenosine-3'-phosphate
  modified_base 17: mod_base = OTHER; note = 2'-O-methyluridine-3'-phosphate
  modified_base 18: mod_base = OTHER; note = 2'-O-methyluridine-3'-phosphate
  modified_base 19: mod_base = OTHER; note = 2'-O-methyladenosine-3'-phosphate
  modified_base 20: mod_base = OTHER; note = 2'-O-methyluridine-3'-phosphate
  modified_base 21: mod_base = OTHER; note = 2'-O-methyluridine-3'-phosphate attached to N-[tris(N-acetylgalactosamine-alkyl)-amidodecanoyl)]-4-hydr oxyprolinol (Hyp-(GalNAc-alkyl)3)
tactcaaagcatgggattatt

SEQ ID NO: 239 - RNA, 21 nt, synthetic construct
  misc_feature 1..21: note = Description of Artificial Sequence: Synthetic oligonucleotide
  source 1..21: mol_type = other RNA
  modified_base 1: mod_base = OTHER; note = 2'-O-methyluridine-3'-phosphorothioate
  modified_base 2: mod_base = OTHER; note = 2'-O-methyluridine-3'-phosphorothioate
  modified_base 3: mod_base = OTHER; note = 2'-O-methyladenosine-3'-phosphate
  modified_base 4: mod_base = OTHER; note = 2'-O-methyladenosine-3'-phosphate
  modified_base 5: mod_base = OTHER; note = 2'-O-methylcytidine-3'-phosphate
  modified_base 6: mod_base = OTHER; note = 2'-O-methyluridine-3'-phosphate
  modified_base 7: mod_base = OTHER; note = 2'-fluorocytidine-3'-phosphate
  modified_base 8: mod_base = OTHER; note = 2'-O-methylcytidine-3'-phosphate
  modified_base 9: mod_base = OTHER; note = 2'-fluorocytidine-3'-phosphate
  modified_base 10: mod_base = OTHER; note = 2'-fluoroadenosine-3'-phosphate
  modified_base 11: mod_base = OTHER; note = 2'-fluorouridine-3'-phosphate
  modified_base 12: mod_base = OTHER; note = 2'-O-methyluridine-3'-phosphate
  modified_base 13: mod_base = OTHER; note = 2'-O-methyladenosine-3'-phosphate
  modified_base 14: mod_base = OTHER; note = 2'-O-methylcytidine-3'-phosphate
  modified_base 15: mod_base = OTHER; note = 2'-O-methylcytidine-3'-phosphate
  modified_base 16: mod_base = OTHER; note = 2'-O-methyladenosine-3'-phosphate
  modified_base 17: mod_base = OTHER; note = 2'-O-methyluridine-3'-phosphate
  modified_base 18: mod_base = OTHER; note = 2'-O-methylguanosine-3'-phosphate
  modified_base 19: mod_base = OTHER; note = 2'-O-methyluridine-3'-phosphate
  modified_base 20: mod_base = OTHER; note = 2'-O-methyladenosine-3'-phosphate
  modified_base 21: mod_base = OTHER; note = 2'-O-methyladenosine-3'-phosphate attached to N-[tris(N-acetylgalactosamine-alkyl)-amidodecanoyl)]-4-hydr oxyprolinol (Hyp-(GalNAc-alkyl)3)
ttaactcccattaccatgtaa

SEQ ID NO: 240 - RNA, 21 nt, synthetic construct
  misc_feature 1..21: note = Description of Artificial Sequence: Synthetic oligonucleotide
  source 1..21: mol_type = other RNA
  modified_base 1: mod_base = OTHER; note = 2'-O-methyluridine-3'-phosphorothioate
  modified_base 2: mod_base = OTHER; note = 2'-O-methyladenosine-3'-phosphorothioate
  modified_base 3: mod_base = OTHER; note = 2'-O-methyladenosine-3'-phosphate
  modified_base 4: mod_base = OTHER; note = 2'-O-methylcytidine-3'-phosphate
  modified_base 5: mod_base = OTHER; note = 2'-O-methyluridine-3'-phosphate
  modified_base 6: mod_base = OTHER; note = 2'-O-methylcytidine-3'-phosphate
  modified_base 7: mod_base = OTHER; note = 2'-fluorocytidine-3'-phosphate
  modified_base 8: mod_base = OTHER; note = 2'-O-methylcytidine-3'-phosphate
  modified_base 9: mod_base = OTHER; note = 2'-fluoroadenosine-3'-phosphate
  modified_base 10: mod_base = OTHER; note = 2'-fluorouridine-3'-phosphate
  modified_base 11: mod_base = OTHER; note = 2'-fluorouridine-3'-phosphate
  modified_base 12: mod_base = OTHER; note = 2'-O-methyladenosine-3'-phosphate
  modified_base 13: mod_base = OTHER; note = 2'-O-methylcytidine-3'-phosphate
  modified_base 14: mod_base = OTHER; note = 2'-O-methylcytidine-3'-phosphate
  modified_base 15: mod_base = OTHER; note = 2'-O-methyladenosine-3'-phosphate
  modified_base 16: mod_base = OTHER; note = 2'-O-methyluridine-3'-phosphate
  modified_base 17: mod_base = OTHER; note = 2'-O-methylguanosine-3'-phosphate
  modified_base 18: mod_base = OTHER; note = 2'-O-methyluridine-3'-phosphate
  modified_base 19: mod_base = OTHER; note = 2'-O-methyladenosine-3'-phosphate
  modified_base 20: mod_base = OTHER; note = 2'-O-methyladenosine-3'-phosphate
  modified_base 21: mod_base = OTHER; note = 2'-O-methyluridine-3'-phosphate attached to N-[tris(N-acetylgalactosamine-alkyl)-amidodecanoyl)]-4-hydr oxyprolinol (Hyp-(GalNAc-alkyl)3)
taactcccattaccatgtaat

SEQ ID NO: 241 - RNA, 21 nt, synthetic construct
  misc_feature 1..21: note = Description of Artificial Sequence: Synthetic oligonucleotide
  source 1..21: mol_type = other RNA
  modified_base 1: mod_base = OTHER; note = 2'-O-methyladenosine-3'-phosphorothioate
  modified_base 2: mod_base = OTHER; note = 2'-O-methyladenosine-3'-phosphorothioate
  modified_base 3: mod_base = OTHER; note = 2'-O-methyladenosine-3'-phosphate
  modified_base 4: mod_base = OTHER; note = 2'-O-methylguanosine-3'-phosphate
  modified_base 5: mod_base = OTHER; note = 2'-O-methylcytidine-3'-phosphate
  modified_base 6: mod_base = OTHER; note = 2'-O-methylguanosine-3'-phosphate
  modified_base 7: mod_base = OTHER; note = 2'-fluorouridine-3'-phosphate
  modified_base 8: mod_base = OTHER; note = 2'-O-methylguanosine-3'-phosphate
  modified_base 9: mod_base = OTHER; note = 2'-fluoroadenosine-3'-phosphate
  modified_base 10: mod_base = OTHER; note = 2'-fluoroguanosine-3'-phosphate
  modified_base 11: mod_base = OTHER; note = 2'-fluorocytidine-3'-phosphate
  modified_base 12: mod_base = OTHER; note = 2'-O-methyluridine-3'-phosphate
  modified_base 13: mod_base = OTHER; note = 2'-O-methyluridine-3'-phosphate
  modified_base 14: mod_base = OTHER; note = 2'-O-methyladenosine-3'-phosphate
  modified_base 15: mod_base = OTHER; note = 2'-O-methyladenosine-3'-phosphate
  modified_base 16: mod_base = OTHER; note = 2'-O-methyladenosine-3'-phosphate
  modified_base 17: mod_base = OTHER; note = 2'-O-methyladenosine-3'-phosphate
  modified_base 18: mod_base = OTHER; note = 2'-O-methyluridine-3'-phosphate
  modified_base 19: mod_base = OTHER; note = 2'-O-methyladenosine-3'-phosphate
  modified_base 20: mod_base = OTHER; note = 2'-O-methylcytidine-3'-phosphate
  modified_base 21: mod_base = OTHER; note = 2'-O-methyladenosine-3'-phosphate attached to N-[tris(N-acetylgalactosamine-alkyl)-amidodecanoyl)]-4-hydr oxyprolinol (Hyp-(GalNAc-alkyl)3)
aaagcgtgagcttaaaataca

SEQ ID NO: 242 - RNA, 21 nt, synthetic construct
  misc_feature 1..21: note = Description of Artificial Sequence: Synthetic oligonucleotide
  source 1..21: mol_type = other RNA
  modified_base 1: mod_base = OTHER; note = 2'-O-methyluridine-3'-phosphorothioate
  modified_base 2: mod_base = OTHER; note = 2'-O-methyluridine-3'-phosphorothioate
  modified_base 3: mod_base = OTHER; note = 2'-O-methylguanosine-3'-phosphate
  modified_base 4: mod_base = OTHER; note = 2'-O-methyluridine-3'-phosphate
  modified_base 5: mod_base = OTHER; note = 2'-O-methyluridine-3'-phosphate
  modified_base 6: mod_base = OTHER; note = 2'-O-methylguanosine-3'-phosphate
  modified_base 7: mod_base = OTHER; note = 2'-fluoroadenosine-3'-phosphate
  modified_base 8: mod_base = OTHER; note = 2'-O-methylcytidine-3'-phosphate
  modified_base 9: mod_base = OTHER; note = 2'-fluoroadenosine-3'-phosphate
  modified_base 10: mod_base = OTHER; note = 2'-fluorouridine-3'-phosphate
  modified_base 11: mod_base = OTHER; note = 2'-fluorouridine-3'-phosphate
  modified_base 12: mod_base = OTHER; note = 2'-O-methyladenosine-3'-phosphate
  modified_base 13: mod_base = OTHER; note = 2'-O-methylguanosine-3'-phosphate
  modified_base 14: mod_base = OTHER; note = 2'-O-methyluridine-3'-phosphate
  modified_base 15: mod_base = OTHER; note = 2'-O-methylcytidine-3'-phosphate
  modified_base 16: mod_base = OTHER; note = 2'-O-methyluridine-3'-phosphate
  modified_base 17: mod_base = OTHER; note = 2'-O-methylcytidine-3'-phosphate
  modified_base 18: mod_base = OTHER; note = 2'-O-methyladenosine-3'-phosphate
  modified_base 19: mod_base = OTHER; note = 2'-O-methylguanosine-3'-phosphate
  modified_base 20: mod_base = OTHER; note = 2'-O-methyluridine-3'-phosphate
  modified_base 21: mod_base = OTHER; note = 2'-O-methyladenosine-3'-phosphate attached to N-[tris(N-acetylgalactosamine-alkyl)-amidodecanoyl)]-4-hydr oxyprolinol (Hyp-(GalNAc-alkyl)3)
ttgttgacattagtctcagta

SEQ ID NO: 243 - RNA, 21 nt, synthetic construct
  misc_feature 1..21: note = Description of Artificial Sequence: Synthetic oligonucleotide
  source 1..21: mol_type = other RNA
  modified_base 1: mod_base = OTHER; note = 2'-O-methyluridine-3'-phosphorothioate
  modified_base 2: mod_base = OTHER; note = 2'-O-methyluridine-3'-phosphorothioate
  modified_base 3: mod_base = OTHER; note = 2'-O-methylguanosine-3'-phosphate
  modified_base 4: mod_base = OTHER; note = 2'-O-methyluridine-3'-phosphate
  modified_base 5: mod_base = OTHER; note = 2'-O-methylcytidine-3'-phosphate
  modified_base 6: mod_base = OTHER; note = 2'-O-methyluridine-3'-phosphate
  modified_base 7: mod_base = OTHER; note = 2'-fluoroadenosine-3'-phosphate
  modified_base 8: mod_base = OTHER; note = 2'-O-methylcytidine-3'-phosphate
  modified_base 9: mod_base = OTHER; note = 2'-fluoroadenosine-3'-phosphate
  modified_base 10: mod_base = OTHER; note = 2'-fluorocytidine-3'-phosphate
  modified_base 11: mod_base = OTHER; note = 2'-fluoroadenosine-3'-phosphate
  modified_base 12: mod_base = OTHER; note = 2'-O-methylcytidine-3'-phosphate
  modified_base 13: mod_base = OTHER; note = 2'-O-methylcytidine-3'-phosphate
  modified_base 14: mod_base = OTHER; note = 2'-O-methylcytidine-3'-phosphate
  modified_base 15: mod_base = OTHER; note = 2'-O-methyluridine-3'-phosphate
  modified_base 16: mod_base = OTHER; note = 2'-O-methylguanosine-3'-phosphate
  modified_base 17: mod_base = OTHER; note = 2'-O-methylcytidine-3'-phosphate
  modified_base 18: mod_base = OTHER; note = 2'-O-methyladenosine-3'-phosphate
  modified_base 19: mod_base = OTHER; note = 2'-O-methyluridine-3'-phosphate
  modified_base 20: mod_base = OTHER; note = 2'-O-methyladenosine-3'-phosphate
  modified_base 21: mod_base = OTHER; note = 2'-O-methyluridine-3'-phosphate attached to N-[tris(N-acetylgalactosamine-alkyl)-amidodecanoyl)]-4-hydr oxyprolinol (Hyp-(GalNAc-alkyl)3)
ttgtctacacaccctgcatat

SEQ ID NO: 244 - RNA, 21 nt, synthetic construct
  misc_feature 1..21: note = Description of Artificial Sequence: Synthetic oligonucleotide
  source 1..21: mol_type = other RNA
  modified_base 1: mod_base = OTHER; note = 2'-O-methyladenosine-3'-phosphorothioate
  modified_base 2: mod_base = OTHER; note = 2'-O-methylguanosine-3'-phosphorothioate
  modified_base 3: mod_base = OTHER; note = 2'-O-methylcytidine-3'-phosphate
  modified_base 4: mod_base = OTHER; note = 2'-O-methylcytidine-3'-phosphate
  modified_base 5: mod_base = OTHER; note = 2'-O-methylcytidine-3'-phosphate
  modified_base 6: mod_base = OTHER; note = 2'-O-methyladenosine-3'-phosphate
  modified_base 7: mod_base = OTHER; note = 2'-fluorocytidine-3'-phosphate
  modified_base 8: mod_base = OTHER; note = 2'-O-methyluridine-3'-phosphate
  modified_base 9: mod_base = OTHER; note = 2'-fluorouridine-3'-phosphate
  modified_base 10: mod_base = OTHER; note = 2'-fluoroadenosine-3'-phosphate
  modified_base 11: mod_base = OTHER; note = 2'-fluorocytidine-3'-phosphate
  modified_base 12: mod_base = OTHER; note = 2'-O-methyladenosine-3'-phosphate
  modified_base 13: mod_base = OTHER; note = 2'-O-methyluridine-3'-phosphate
  modified_base 14: mod_base = OTHER; note = 2'-O-methyluridine-3'-phosphate
  modified_base 15: mod_base = OTHER; note = 2'-O-methyluridine-3'-phosphate
  modified_base 16: mod_base = OTHER; note = 2'-O-methyladenosine-3'-phosphate
  modified_base 17: mod_base = OTHER; note = 2'-O-methylcytidine-3'-phosphate
  modified_base 18: mod_base = OTHER; note = 2'-O-methyladenosine-3'-phosphate
  modified_base 19: mod_base = OTHER; note = 2'-O-methyladenosine-3'-phosphate
  modified_base 20: mod_base = OTHER; note = 2'-O-methyladenosine-3'-phosphate
  modified_base 21: mod_base = OTHER; note = 2'-O-methylcytidine-3'-phosphate attached to N-[tris(N-acetylgalactosamine-alkyl)-amidodecanoyl)]-4-hydr oxyprolinol (Hyp-(GalNAc-alkyl)3)
agcccacttacatttacaaac

SEQ ID NO: 245 - RNA, 21 nt, synthetic construct
  misc_feature 1..21: note = Description of Artificial Sequence: Synthetic oligonucleotide
  source 1..21: mol_type = other RNA
  modified_base 1: mod_base = OTHER; note = 2'-O-methyluridine-3'-phosphorothioate
  modified_base 2: mod_base = OTHER; note = 2'-O-methyluridine-3'-phosphorothioate
  modified_base 3: mod_base = OTHER; note = 2'-O-methylcytidine-3'-phosphate
  modified_base 4: mod_base = OTHER; note = 2'-O-methyluridine-3'-phosphate
  modified_base 5: mod_base = OTHER; note = 2'-O-methyladenosine-3'-phosphate
  modified_base 6: mod_base = OTHER; note = 2'-O-methyladenosine-3'-phosphate
  modified_base 7: mod_base = OTHER; note = 2'-fluorocytidine-3'-phosphate
  modified_base 8: mod_base = OTHER; note = 2'-O-methylcytidine-3'-phosphate
  modified_base 9: mod_base = OTHER; note = 2'-fluorouridine-3'-phosphate
  modified_base 10: mod_base = OTHER; note = 2'-fluorouridine-3'-phosphate
  modified_base 11: mod_base = OTHER; note = 2'-fluorouridine-3'-phosphate
  modified_base 12: mod_base = OTHER; note = 2'-O-methyladenosine-3'-phosphate
  modified_base 13: mod_base = OTHER; note = 2'-O-methylcytidine-3'-phosphate
  modified_base 14: mod_base = OTHER; note = 2'-O-methyladenosine-3'-phosphate
  modified_base 15: mod_base = OTHER; note = 2'-O-methyluridine-3'-phosphate
  modified_base 16: mod_base = OTHER; note = 2'-O-methylguanosine-3'-phosphate
  modified_base 17: mod_base = OTHER; note = 2'-O-methyladenosine-3'-phosphate
  modified_base 18: mod_base = OTHER; note = 2'-O-methylguanosine-3'-phosphate
  modified_base 19: mod_base = OTHER; note = 2'-O-methylguanosine-3'-phosphate
  modified_base 20: mod_base = OTHER; note = 2'-O-methyladenosine-3'-phosphate
  modified_base 21: mod_base = OTHER; note = 2'-O-methyladenosine-3'-phosphate attached to N-[tris(N-acetylgalactosamine-alkyl)-amidodecanoyl)]-4-hydr oxyprolinol (Hyp-(GalNAc-alkyl)3)
ttctaacctttacatgaggaa

SEQ ID NO: 246 - RNA, 21 nt, synthetic construct
  misc_feature 1..21: note = Description of Artificial Sequence: Synthetic oligonucleotide
  source 1..21: mol_type = other RNA
  modified_base 1: mod_base = OTHER; note = 2'-O-methyladenosine-3'-phosphorothioate
  modified_base 2: mod_base = OTHER; note = 2'-O-methylcytidine-3'-phosphorothioate
  modified_base 3: mod_base = OTHER; note = 2'-O-methylcytidine-3'-phosphate
  modified_base 4: mod_base = OTHER; note = 2'-O-methyluridine-3'-phosphate
  modified_base 5: mod_base = OTHER; note = 2'-O-methyluridine-3'-phosphate
  modified_base 6: mod_base = OTHER; note = 2'-O-methyluridine-3'-phosphate
  modified_base 7: mod_base = OTHER; note = 2'-fluoroadenosine-3'-phosphate
  modified_base 8: mod_base = OTHER; note = 2'-O-methylcytidine-3'-phosphate
  modified_base 9: mod_base = OTHER; note = 2'-fluoroadenosine-3'-phosphate
  modified_base 10: mod_base = OTHER; note = 2'-fluorouridine-3'-phosphate
  modified_base 11: mod_base = OTHER; note = 2'-fluoroguanosine-3'-phosphate
  modified_base 12: mod_base = OTHER; note = 2'-O-methyladenosine-3'-phosphate
  modified_base 13: mod_base = OTHER; note = 2'-O-methylguanosine-3'-phosphate
  modified_base 14: mod_base = OTHER; note = 2'-O-methylguanosine-3'-phosphate
  modified_base 15: mod_base = OTHER; note = 2'-O-methyladenosine-3'-phosphate
  modified_base 16: mod_base = OTHER; note = 2'-O-methylcytidine-3'-phosphate
  modified_base 17: mod_base = OTHER; note = 2'-O-methyluridine-3'-phosphate
  modified_base 18: mod_base = OTHER; note = 2'-O-methylcytidine-3'-phosphate
  modified_base 19: mod_base = OTHER; note = 2'-O-methyluridine-3'-phosphate
  modified_base 20: mod_base = OTHER; note = 2'-O-methyladenosine-3'-phosphate
  modified_base 21: mod_base = OTHER; note = 2'-O-methyluridine-3'-phosphate attached to N-[tris(N-acetylgalactosamine-alkyl)-amidodecanoyl)]-4-hydr oxyprolinol (Hyp-(GalNAc-alkyl)3)
acctttacatgaggactctat

SEQ ID NO: 247 - RNA, 21 nt, synthetic construct
  misc_feature 1..21: note = Description of Artificial Sequence: Synthetic oligonucleotide
  source 1..21: mol_type = other RNA
  modified_base 1: mod_base = OTHER; note = 2'-O-methyluridine-3'-phosphorothioate
  modified_base 2: mod_base = OTHER; note = 2'-O-methyluridine-3'-phosphorothioate
  modified_base 3: mod_base = OTHER; note = 2'-O-methyluridine-3'-phosphate
  modified_base 4: mod_base = OTHER; note = 2'-O-methyladenosine-3'-phosphate
  modified_base 5: mod_base = OTHER; note = 2'-O-methyladenosine-3'-phosphate
  modified_base 6: mod_base = OTHER; note = 2'-O-methylcytidine-3'-phosphate
  modified_base 7: mod_base = OTHER; note = 2'-fluorouridine-3'-phosphate
  modified_base 8: mod_base = OTHER; note = 2'-O-methylcytidine-3'-phosphate
  modified_base 9: mod_base = OTHER; note = 2'-fluorocytidine-3'-phosphate
  modified_base 10: mod_base = OTHER; note = 2'-fluorocytidine-3'-phosphate
  modified_base 11: mod_base = OTHER; note = 2'-fluoroadenosine-3'-phosphate
  modified_base 12: mod_base = OTHER; note = 2'-O-methyluridine-3'-phosphate
  modified_base 13: mod_base = OTHER; note = 2'-O-methyluridine-3'-phosphate
  modified_base 14: mod_base = OTHER; note = 2'-O-methyladenosine-3'-phosphate
  modified_base 15: mod_base = OTHER; note = 2'-O-methylcytidine-3'-phosphate
  modified_base 16: mod_base = OTHER; note = 2'-O-methylcytidine-3'-phosphate
  modified_base 17: mod_base = OTHER; note = 2'-O-methyladenosine-3'-phosphate
  modified_base 18: mod_base = OTHER; note = 2'-O-methyluridine-3'-phosphate
  modified_base 19: mod_base = OTHER; note = 2'-O-methylguanosine-3'-phosphate
  modified_base 20: mod_base = OTHER; note = 2'-O-methyluridine-3'-phosphate
  modified_base 21: mod_base = OTHER; note = 2'-O-methyladenosine-3'-phosphate attached to N-[tris(N-acetylgalactosamine-alkyl)-amidodecanoyl)]-4-hydr oxyprolinol (Hyp-(GalNAc-alkyl)3)
tttaactcccattaccatgta

SEQ ID NO: 248 - RNA, 21 nt, synthetic construct
  misc_feature 1..21: note = Description of Artificial Sequence: Synthetic oligonucleotide
  source 1..21: mol_type = other RNA
  modified_base 1: mod_base = OTHER; note = 2'-O-methyluridine-3'-phosphorothioate
  modified_base 2: mod_base = OTHER; note = 2'-O-methylguanosine-3'-phosphorothioate
  modified_base 3: mod_base = OTHER; note = 2'-O-methylcytidine-3'-phosphate
  modified_base 4: mod_base = OTHER; note = 2'-O-methyluridine-3'-phosphate
  modified_base 5: mod_base = OTHER; note = 2'-O-methylcytidine-3'-phosphate
  modified_base 6: mod_base = OTHER; note = 2'-O-methyladenosine-3'-phosphate
  modified_base 7: mod_base = OTHER; note = 2'-fluoroguanosine-3'-phosphate
  modified_base 8: mod_base = OTHER; note = 2'-O-methylguanosine-3'-phosphate
  modified_base 9: mod_base = OTHER; note = 2'-fluoroadenosine-3'-phosphate
  modified_base 10: mod_base = OTHER; note = 2'-fluoroadenosine-3'-phosphate
  modified_base 11: mod_base = OTHER; note = 2'-fluoroadenosine-3'-phosphate
  modified_base 12: mod_base = OTHER; note = 2'-O-methylcytidine-3'-phosphate
  modified_base 13: mod_base = OTHER; note = 2'-O-methylguanosine-3'-phosphate
  modified_base 14: mod_base = OTHER; note = 2'-O-methyladenosine-3'-phosphate
  modified_base 15: mod_base = OTHER; note = 2'-O-methylguanosine-3'-phosphate
  modified_base 16: mod_base = OTHER; note = 2'-O-methyladenosine-3'-phosphate
  modified_base 17: mod_base = OTHER; note = 2'-O-methylcytidine-3'-phosphate
  modified_base 18: mod_base = OTHER; note = 2'-O-methyluridine-3'-phosphate
  modified_base 19: mod_base = OTHER; note = 2'-O-methyluridine-3'-phosphate
  modified_base 20: mod_base = OTHER; note = 2'-O-methyluridine-3'-phosphate
  modified_base 21: mod_base = OTHER; note = 2'-O-methyladenosine-3'-phosphate attached to N-[tris(N-acetylgalactosamine-alkyl)-amidodecanoyl)]-4-hydr oxyprolinol (Hyp-(GalNAc-alkyl)3)
tgctcaggaaacgagacttta

SEQ ID NO: 249 - RNA, 21 nt, synthetic construct
  misc_feature 1..21: note = Description of Artificial Sequence: Synthetic oligonucleotide
  source 1..21: mol_type = other RNA
  modified_base 1: mod_base = OTHER; note = 2'-O-methyladenosine-3'-phosphorothioate
  modified_base 2: mod_base = OTHER; note = 2'-O-methyluridine-3'-phosphorothioate
  modified_base 3: mod_base = OTHER; note = 2'-O-methyladenosine-3'-phosphate
  modified_base 4: mod_base = OTHER; note = 2'-O-methylguanosine-3'-phosphate
  modified_base 5: mod_base = OTHER; note = 2'-O-methyluridine-3'-phosphate
  modified_base 6: mod_base = OTHER; note = 2'-O-methyluridine-3'-phosphate
  modified_base 7: mod_base = OTHER; note = 2'-fluoroadenosine-3'-phosphate
  modified_base 8: mod_base = OTHER; note = 2'-O-methyladenosine-3'-phosphate
  modified_base 9: mod_base = OTHER; note = 2'-fluorocytidine-3'-phosphate
  modified_base 10: mod_base = OTHER; note = 2'-fluoroadenosine-3'-phosphate
  modified_base 11: mod_base = OTHER; note = 2'-fluorocytidine-3'-phosphate
  modified_base 12: mod_base = OTHER; note = 2'-O-methyladenosine-3'-phosphate
  modified_base 13: mod_base = OTHER; note = 2'-O-methylcytidine-3'-phosphate
  modified_base 14: mod_base = OTHER; note = 2'-O-methyluridine-3'-phosphate
  modified_base 15: mod_base = OTHER; note = 2'-O-methyladenosine-3'-phosphate
  modified_base 16: mod_base = OTHER; note = 2'-O-methylcytidine-3'-phosphate
  modified_base 17: mod_base = OTHER; note = 2'-O-methylcytidine-3'-phosphate
  modified_base 18: mod_base = OTHER; note = 2'-O-methylguanosine-3'-phosphate
  modified_base 19: mod_base = OTHER; note = 2'-O-methyladenosine-3'-phosphate
  modified_base 20: mod_base = OTHER; note = 2'-O-methyladenosine-3'-phosphate
  modified_base 21: mod_base = OTHER; note = 2'-O-methyluridine-3'-phosphate attached to N-[tris(N-acetylgalactosamine-alkyl)-amidodecanoyl)]-4-hydr oxyprolinol (Hyp-(GalNAc-alkyl)3)
atagttaacacactaccgaat

SEQ ID NO: 250 - RNA, 21 nt, synthetic construct
  misc_feature 1..21: note = Description of Artificial Sequence: Synthetic oligonucleotide
  source 1..21: mol_type = other RNA
  modified_base 1: mod_base = OTHER; note = 2'-O-methyluridine-3'-phosphorothioate
  modified_base 2: mod_base = OTHER; note = 2'-O-methylguanosine-3'-phosphorothioate
  modified_base 3: mod_base = OTHER; note = 2'-O-methyladenosine-3'-phosphate
  modified_base 4: mod_base = OTHER; note = 2'-O-methyluridine-3'-phosphate
  modified_base 5: mod_base = OTHER; note = 2'-O-methylguanosine-3'-phosphate
  modified_base 6: mod_base = OTHER; note = 2'-O-methylcytidine-3'-phosphate
  modified_base 7: mod_base = OTHER; note = 2'-fluoroadenosine-3'-phosphate
  modified_base 8: mod_base = OTHER; note = 2'-O-methylguanosine-3'-phosphate
  modified_base 9: mod_base = OTHER; note = 2'-fluorocytidine-3'-phosphate
  modified_base 10: mod_base = OTHER; note = 2'-fluorouridine-3'-phosphate
  modified_base 11: mod_base = OTHER; note = 2'-fluorouridine-3'-phosphate
  modified_base 12: mod_base = OTHER; note = 2'-O-methyladenosine-3'-phosphate
  modified_base 13: mod_base = OTHER; note = 2'-O-methyluridine-3'-phosphate
  modified_base 14: mod_base = OTHER; note = 2'-O-methyladenosine-3'-phosphate
  modified_base 15: mod_base = OTHER; note = 2'-O-methylcytidine-3'-phosphate
  modified_base 16: mod_base = OTHER; note = 2'-O-methylguanosine-3'-phosphate
  modified_base 17: mod_base = OTHER; note = 2'-O-methyladenosine-3'-phosphate
  modified_base 18: mod_base = OTHER; note = 2'-O-methyladenosine-3'-phosphate
  modified_base 19: mod_base = OTHER; note = 2'-O-methyladenosine-3'-phosphate
  modified_base 20: mod_base = OTHER; note = 2'-O-methyluridine-3'-phosphate
  modified_base 21: mod_base = OTHER; note = 2'-O-methyladenosine-3'-phosphate attached to N-[tris(N-acetylgalactosamine-alkyl)-amidodecanoyl)]-4-hydr oxyprolinol (Hyp-(GalNAc-alkyl)3)
tgatgcagcttatacgaaata

SEQ ID NO: 251 - RNA, 21 nt, synthetic construct
  misc_feature 1..21: note = Description of Artificial Sequence: Synthetic oligonucleotide
  source 1..21: mol_type = other RNA
  modified_base 1: mod_base = OTHER; note = 2'-O-methyluridine-3'-phosphorothioate
  modified_base 2: mod_base = OTHER; note = 2'-O-methylcytidine-3'-phosphorothioate
  modified_base 3: mod_base = OTHER; note = 2'-O-methyluridine-3'-phosphate
  modified_base 4: mod_base = OTHER; note = 2'-O-methylguanosine-3'-phosphate
  modified_base 5: mod_base = OTHER; note = 2'-O-methyluridine-3'-phosphate
  modified_base 6: mod_base = OTHER; note = 2'-O-methylcytidine-3'-phosphate
  modified_base 7: mod_base = OTHER; note = 2'-fluorocytidine-3'-phosphate
  modified_base 8: mod_base = OTHER; note = 2'-O-methyluridine-3'-phosphate
  modified_base 9: mod_base = OTHER; note = 2'-fluorouridine-3'-phosphate
  modified_base 10: mod_base = OTHER; note = 2'-fluoroguanosine-3'-phosphate
  modified_base 11: mod_base = OTHER; note = 2'-fluoroadenosine-3'-phosphate
  modified_base 12: mod_base = OTHER; note = 2'-O-methyladenosine-3'-phosphate
  modified_base 13: mod_base = OTHER; note = 2'-O-methylguanosine-3'-phosphate
  modified_base 14: mod_base = OTHER; note = 2'-O-methylguanosine-3'-phosphate
  modified_base 15: mod_base = OTHER; note = 2'-O-methyladenosine-3'-phosphate
  modified_base 16: mod_base = OTHER; note = 2'-O-methylcytidine-3'-phosphate
  modified_base 17: mod_base = OTHER; note = 2'-O-methyluridine-3'-phosphate
  modified_base 18: mod_base = OTHER; note = 2'-O-methyladenosine-3'-phosphate
  modified_base 19: mod_base = OTHER; note = 2'-O-methyladenosine-3'-phosphate
  modified_base 20: mod_base = OTHER; note = 2'-O-methyluridine-3'-phosphate
  modified_base 21: mod_base = OTHER; note = 2'-O-methyladenosine-3'-phosphate attached to N-[tris(N-acetylgalactosamine-alkyl)-amidodecanoyl)]-4-hydr oxyprolinol (Hyp-(GalNAc-alkyl)3)
tctgtccttgaaggactaata

SEQ ID NO: 252 - RNA, 21 nt, synthetic construct
  misc_feature 1..21: note = Description of Artificial Sequence: Synthetic oligonucleotide
  source 1..21: mol_type = other RNA
  modified_base 1: mod_base = OTHER; note = 2'-O-methylguanosine-3'-phosphorothioate
  modified_base 2: mod_base = OTHER; note = 2'-O-methyladenosine-3'-phosphorothioate
  modified_base 3: mod_base = OTHER; note = 2'-O-methyladenosine-3'-phosphate
  modified_base 4: mod_base = OTHER; note = 2'-O-methyladenosine-3'-phosphate
  modified_base 5: mod_base = OTHER; note = 2'-O-methylcytidine-3'-phosphate
  modified_base 6: mod_base = OTHER; note = 2'-O-methylguanosine-3'-phosphate
  modified_base 7: mod_base = OTHER; note = 2'-fluoroadenosine-3'-phosphate
  modified_base 8: mod_base = OTHER; note = 2'-O-methylguanosine-3'-phosphate
  modified_base 9: mod_base = OTHER; note = 2'-fluoroadenosine-3'-phosphate
  modified_base 10: mod_base = OTHER; note = 2'-fluorocytidine-3'-phosphate
  modified_base 11: mod_base = OTHER; note = 2'-fluorouridine-3'-phosphate
  modified_base 12: mod_base = OTHER; note = 2'-O-methyluridine-3'-phosphate
  modified_base 13: mod_base = OTHER; note = 2'-O-methyluridine-3'-phosphate
  modified_base 14: mod_base = OTHER; note = 2'-O-methylcytidine-3'-phosphate
  modified_base 15: mod_base = OTHER; note = 2'-O-methylcytidine-3'-phosphate
  modified_base 16: mod_base = OTHER; note = 2'-O-methyladenosine-3'-phosphate
  modified_base 17: mod_base = OTHER; note = 2'-O-methyluridine-3'-phosphate
  modified_base 18: mod_base = OTHER; note = 2'-O-methyluridine-3'-phosphate
  modified_base 19: mod_base = OTHER; note = 2'-O-methyladenosine-3'-phosphate
  modified_base 20: mod_base = OTHER; note = 2'-O-methylcytidine-3'-phosphate
  modified_base 21: mod_base = OTHER; note = 2'-O-methyladenosine-3'-phosphate attached to N-[tris(N-acetylgalactosamine-alkyl)-amidodecanoyl)]-4-hydr oxyprolinol (Hyp-(GalNAc-alkyl)3)
gaaacgagactttccattaca

SEQ ID NO: 253 - RNA, 21 nt, synthetic construct
  misc_feature 1..21: note = Description of Artificial Sequence: Synthetic oligonucleotide
  source 1..21: mol_type = other RNA
  modified_base 1: mod_base = OTHER; note = 2'-O-methylguanosine-3'-phosphorothioate
  modified_base 2: mod_base = OTHER; note = 2'-O-methyluridine-3'-phosphorothioate
  modified_base 3: mod_base = OTHER; note = 2'-O-methyluridine-3'-phosphate
  modified_base 4: mod_base = OTHER; note = 2'-O-methylcytidine-3'-phosphate
  modified_base 5: mod_base = OTHER; note = 2'-O-methyluridine-3'-phosphate
  modified_base 6: mod_base = OTHER; note = 2'-O-methyluridine-3'-phosphate
  modified_base 7: mod_base = OTHER; note = 2'-fluoroguanosine-3'-phosphate
  modified_base 8: mod_base = OTHER; note = 2'-O-methyluridine-3'-phosphate
  modified_base 9: mod_base = OTHER; note = 2'-fluoroadenosine-3'-phosphate
  modified_base 10: mod_base = OTHER; note = 2'-fluoroadenosine-3'-phosphate
  modified_base 11: mod_base = OTHER; note = 2'-fluorouridine-3'-phosphate
  modified_base 12: mod_base = OTHER; note = 2'-O-methyluridine-3'-phosphate
  modified_base 13: mod_base = OTHER; note = 2'-O-methyluridine-3'-phosphate
  modified_base 14: mod_base = OTHER; note = 2'-O-methyluridine-3'-phosphate
  modified_base 15: mod_base = OTHER; note = 2'-O-methyladenosine-3'-phosphate
  modified_base 16: mod_base = OTHER; note = 2'-O-methylcytidine-3'-phosphate
  modified_base 17: mod_base = OTHER; note = 2'-O-methyladenosine-3'-phosphate
  modified_base 18: mod_base = OTHER; note = 2'-O-methylcytidine-3'-phosphate
  modified_base 19: mod_base = OTHER; note = 2'-O-methylguanosine-3'-phosphate
  modified_base 20: mod_base = OTHER; note = 2'-O-methylcytidine-3'-phosphate
  modified_base 21: mod_base = OTHER; note = 2'-O-methyluridine-3'-phosphate attached to N-[tris(N-acetylgalactosamine-alkyl)-amidodecanoyl)]-4-hydr oxyprolinol (Hyp-(GalNAc-alkyl)3)
gttcttgtaattttacacgct

SEQ ID NO: 254 - RNA, 21 nt, synthetic construct
  misc_feature 1..21: note = Description of Artificial Sequence: Synthetic oligonucleotide
  source 1..21: mol_type = other RNA
  modified_base 1: mod_base = OTHER; note = 2'-O-methyluridine-3'-phosphorothioate
  modified_base 2: mod_base = OTHER; note = 2'-O-methylcytidine-3'-phosphorothioate
  modified_base 3: mod_base = OTHER; note = 2'-O-methylcytidine-3'-phosphate
  modified_base 4: mod_base = OTHER; note = 2'-O-methyluridine-3'-phosphate
  modified_base 5: mod_base = OTHER; note = 2'-O-methyluridine-3'-phosphate
  modified_base 6: mod_base = OTHER; note = 2'-O-methyluridine-3'-phosphate
  modified_base 7: mod_base = OTHER; note = 2'-fluorocytidine-3'-phosphate
  modified_base 8: mod_base = OTHER; note = 2'-O-methyladenosine-3'-phosphate
  modified_base 9: mod_base = OTHER; note = 2'-fluorouridine-3'-phosphate
  modified_base 10: mod_base = OTHER; note = 2'-fluoroadenosine-3'-phosphate
  modified_base 11: mod_base = OTHER; note = 2'-fluorouridine-3'-phosphate
  modified_base 12: mod_base = OTHER; note = 2'-O-methyladenosine-3'-phosphate
  modified_base 13: mod_base = OTHER; note = 2'-O-methylguanosine-3'-phosphate
  modified_base 14: mod_base = OTHER; note = 2'-O-methyluridine-3'-phosphate
  modified_base 15: mod_base = OTHER; note = 2'-O-methyluridine-3'-phosphate
  modified_base 16: mod_base = OTHER; note = 2'-O-methyladenosine-3'-phosphate
  modified_base 17: mod_base = OTHER; note = 2'-O-methylguanosine-3'-phosphate
  modified_base 18: mod_base = OTHER; note = 2'-O-methylcytidine-3'-phosphate
  modified_base 19: mod_base = OTHER; note = 2'-O-methyluridine-3'-phosphate
  modified_base 20: mod_base = OTHER; note = 2'-O-methyladenosine-3'-phosphate
  modified_base 21: mod_base = OTHER; note = 2'-O-methyladenosine-3'-phosphate attached to N-[tris(N-acetylgalactosamine-alkyl)-amidodecanoyl)]-4-hydr oxyprolinol (Hyp-(GalNAc-alkyl)3)
tcctttcatatagttagctaa

SEQ ID NO: 255 - RNA, 21 nt, synthetic construct
  misc_feature 1..21: note = Description of Artificial Sequence: Synthetic oligonucleotide
  source 1..21: mol_type = other RNA
  modified_base 1: mod_base = OTHER; note = 2'-O-methyladenosine-3'-phosphorothioate
  modified_base 2: mod_base = OTHER; note = 2'-O-methyladenosine-3'-phosphorothioate
  modified_base 3: mod_base = OTHER; note = 2'-O-methyladenosine-3'-phosphate
  modified_base 4: mod_base = OTHER; note = 2'-O-methylguanosine-3'-phosphate
  modified_base 5: mod_base = OTHER; note = 2'-O-methyluridine-3'-phosphate
  modified_base 6: mod_base = OTHER; note = 2'-O-methylcytidine-3'-phosphate
  modified_base 7: mod_base = OTHER; note = 2'-fluorouridine-3'-phosphate
  modified_base 8: mod_base = OTHER; note = 2'-O-methylguanosine-3'-phosphate
  modified_base 9: mod_base = OTHER; note = 2'-fluorouridine-3'-phosphate
  modified_base 10: mod_base = OTHER; note = 2'-fluorocytidine-3'-phosphate
  modified_base 11: mod_base = OTHER; note = 2'-fluorocytidine-3'-phosphate
  modified_base 12: mod_base = OTHER; note = 2'-O-methyluridine-3'-phosphate
  modified_base 13: mod_base = OTHER; note = 2'-O-methyluridine-3'-phosphate
  modified_base 14: mod_base = OTHER; note = 2'-O-methylguanosine-3'-phosphate
  modified_base 15: mod_base = OTHER; note = 2'-O-methyladenosine-3'-phosphate
  modified_base 16: mod_base = OTHER; note = 2'-O-methyladenosine-3'-phosphate
  modified_base 17: mod_base = OTHER; note = 2'-O-methylguanosine-3'-phosphate
  modified_base 18: mod_base = OTHER; note = 2'-O-methylguanosine-3'-phosphate
  modified_base 19: mod_base = OTHER; note = 2'-O-methyladenosine-3'-phosphate
  modified_base 20: mod_base = OTHER; note = 2'-O-methylcytidine-3'-phosphate
  modified_base 21: mod_base = OTHER; note = 2'-O-methyluridine-3'-phosphate attached to N-[tris(N-acetylgalactosamine-alkyl)-amidodecanoyl)]-4-hydr oxyprolinol (Hyp-(GalNAc-alkyl)3)
aaagtctgtccttgaaggact

SEQ ID NO: 256 - RNA, 21 nt, synthetic construct
  misc_feature 1..21: note = Description of Artificial Sequence: Synthetic oligonucleotide
  source 1..21: mol_type = other RNA
  modified_base 1: mod_base = OTHER; note = 2'-O-methylguanosine-3'-phosphorothioate
  modified_base 2: mod_base = OTHER; note = 2'-O-methyluridine-3'-phosphorothioate
  modified_base 3: mod_base = OTHER; note = 2'-O-methylcytidine-3'-phosphate
  modified_base 4: mod_base = OTHER; note = 2'-O-methylcytidine-3'-phosphate
  modified_base 5: mod_base = OTHER; note = 2'-O-methyluridine-3'-phosphate
  modified_base 6: mod_base = OTHER; note = 2'-O-methyluridine-3'-phosphate
  modified_base 7: mod_base = OTHER; note = 2'-fluoroguanosine-3'-phosphate
  modified_base 8: mod_base = OTHER; note = 2'-O-methyladenosine-3'-phosphate
  modified_base 9: mod_base = OTHER; note = 2'-fluoroadenosine-3'-phosphate
  modified_base 10: mod_base = OTHER; note = 2'-fluoroguanosine-3'-phosphate
  modified_base 11: mod_base = OTHER; note = 2'-fluoroguanosine-3'-phosphate
  modified_base 12: mod_base = OTHER; note = 2'-O-methyladenosine-3'-phosphate
  modified_base 13: mod_base = OTHER; note = 2'-O-methylcytidine-3'-phosphate
  modified_base 14: mod_base = OTHER; note = 2'-O-methyluridine-3'-phosphate
  modified_base 15: mod_base = OTHER; note = 2'-O-methyladenosine-3'-phosphate
  modified_base 16: mod_base = OTHER; note = 2'-O-methyladenosine-3'-phosphate
  modified_base 17: mod_base = OTHER; note = 2'-O-methyluridine-3'-phosphate
  modified_base 18: mod_base = OTHER; note = 2'-O-methyladenosine-3'-phosphate
  modified_base 19: mod_base = OTHER; note = 2'-O-methylguanosine-3'-phosphate
  modified_base 20: mod_base = OTHER; note = 2'-O-methyladenosine-3'-phosphate
  modified_base 21: mod_base = OTHER; note = 2'-O-methyladenosine-3'-phosphate attached to N-[tris(N-acetylgalactosamine-alkyl)-amidodecanoyl)]-4-hydr oxyprolinol (Hyp-(GalNAc-alkyl)3)
gtccttgaaggactaatagaa

SEQ ID NO: 257 - RNA, 21 nt, synthetic construct
  misc_feature 1..21: note = Description of Artificial Sequence: Synthetic oligonucleotide
  source 1..21: mol_type = other RNA
  modified_base 1: mod_base = OTHER; note = 2'-O-methylcytidine-3'-phosphorothioate
  modified_base 2: mod_base = OTHER; note = 2'-O-methylguanosine-3'-phosphorothioate
  modified_base 3: mod_base = OTHER; note = 2'-O-methyluridine-3'-phosphate
  modified_base 4: mod_base = OTHER; note = 2'-O-methyluridine-3'-phosphate
  modified_base 5: mod_base = OTHER; note = 2'-O-methylcytidine-3'-phosphate
  modified_base 6: mod_base = OTHER; note = 2'-O-methyluridine-3'-phosphate
  modified_base 7: mod_base = OTHER; note = 2'-fluorouridine-3'-phosphate
  modified_base 8: mod_base = OTHER; note = 2'-O-methylguanosine-3'-phosphate
  modified_base 9: mod_base = OTHER; note = 2'-fluorouridine-3'-phosphate
  modified_base 10: mod_base = OTHER; note = 2'-fluoroadenosine-3'-phosphate
  modified_base 11: mod_base = OTHER; note = 2'-fluoroadenosine-3'-phosphate
  modified_base 12: mod_base = OTHER; note = 2'-O-methyluridine-3'-phosphate
  modified_base 13: mod_base = OTHER; note = 2'-O-methyluridine-3'-phosphate
  modified_base 14: mod_base = OTHER; note = 2'-O-methyluridine-3'-phosphate
  modified_base 15: mod_base = OTHER; note = 2'-O-methyluridine-3'-phosphate
  modified_base 16: mod_base = OTHER; note = 2'-O-methyladenosine-3'-phosphate
  modified_base 17: mod_base = OTHER; note = 2'-O-methylcytidine-3'-phosphate
  modified_base 18: mod_base = OTHER; note = 2'-O-methyladenosine-3'-phosphate
  modified_base 19: mod_base = OTHER; note = 2'-O-methylcytidine-3'-phosphate
  modified_base 20: mod_base = OTHER; note = 2'-O-methylguanosine-3'-phosphate
  modified_base 21: mod_base = OTHER; note = 2'-O-methyladenosine-3'-phosphate attached to N-[tris(N-acetylgalactosamine-alkyl)-amidodecanoyl)]-4-hydr oxyprolinol (Hyp-(GalNAc-alkyl)3)
cgttcttgtaattttacacga

SEQ ID NO: 258 - RNA, 21 nt, synthetic construct
  misc_feature 1..21: note = Description of Artificial Sequence: Synthetic oligonucleotide
  source 1..21: mol_type = other RNA
  modified_base 1: mod_base = OTHER; note = 2'-O-methyluridine-3'-phosphorothioate
  modified_base 2: mod_base = OTHER; note = 2'-O-methylguanosine-3'-phosphorothioate
  modified_base 3: mod_base = OTHER; note = 2'-O-methyluridine-3'-phosphate
  modified_base 4: mod_base = OTHER; note = 2'-O-methyladenosine-3'-phosphate
  modified_base 5: mod_base = OTHER; note = 2'-O-methyluridine-3'-phosphate
  modified_base 6: mod_base = OTHER; note = 2'-O-methyladenosine-3'-phosphate
  modified_base 7: mod_base = OTHER; note = 2'-fluoroguanosine-3'-phosphate
  modified_base 8: mod_base = OTHER; note = 2'-O-methyluridine-3'-phosphate
  modified_base 9: mod_base = OTHER; note = 2'-fluorouridine-3'-phosphate
  modified_base 10: mod_base = OTHER; note = 2'-fluoroadenosine-3'-phosphate
  modified_base 11: mod_base = OTHER; note = 2'-fluoroadenosine-3'-phosphate
  modified_base 12: mod_base = OTHER; note = 2'-O-methylcytidine-3'-phosphate
  modified_base 13: mod_base = OTHER; note = 2'-O-methyladenosine-3'-phosphate
  modified_base 14: mod_base = OTHER; note = 2'-O-methylcytidine-3'-phosphate
  modified_base 15: mod_base = OTHER; note = 2'-O-methyladenosine-3'-phosphate
  modified_base 16: mod_base = OTHER; note = 2'-O-methylcytidine-3'-phosphate
  modified_base 17: mod_base = OTHER; note = 2'-O-methyluridine-3'-phosphate
  modified_base 18: mod_base = OTHER; note = 2'-O-methyladenosine-3'-phosphate
  modified_base 19: mod_base = OTHER; note = 2'-O-methylcytidine-3'-phosphate
  modified_base 20: mod_base = OTHER; note = 2'-O-methylcytidine-3'-phosphate
  modified_base 21: mod_base = OTHER; note = 2'-O-methyladenosine-3'-phosphate attached to N-[tris(N-acetylgalactosamine-alkyl)-amidodecanoyl)]-4-hydr oxyprolinol (Hyp-(GalNAc-alkyl)3)
tgtatagttaacacactacca

SEQ ID NO: 259 - RNA, 21 nt, synthetic construct
  misc_feature 1..21: note = Description of Artificial Sequence: Synthetic oligonucleotide
  source 1..21: mol_type = other RNA
  modified_base 1: mod_base = OTHER; note = 2'-O-methyladenosine-3'-phosphorothioate
  modified_base 2: mod_base = OTHER; note = 2'-O-methylguanosine-3'-phosphorothioate
  modified_base 3: mod_base = OTHER; note = 2'-O-methylguanosine-3'-phosphate
  modified_base 4: mod_base = OTHER; note = 2'-O-methyladenosine-3'-phosphate
  modified_base 5: mod_base = OTHER; note = 2'-O-methylcytidine-3'-phosphate
  modified_base 6: mod_base = OTHER; note = 2'-O-methyluridine-3'-phosphate
  modified_base 7: mod_base = OTHER; note = 2'-fluorocytidine-3'-phosphate
  modified_base 8: mod_base = OTHER; note = 2'-O-methyluridine-3'-phosphate
  modified_base 9: mod_base = OTHER; note = 2'-fluoroadenosine-3'-phosphate
  modified_base 10: mod_base = OTHER; note = 2'-fluorouridine-3'-phosphate
  modified_base 11: mod_base = OTHER; note = 2'-fluorouridine-3'-phosphate
  modified_base 12: mod_base = OTHER; note = 2'-O-methylcytidine-3'-phosphate
  modified_base 13: mod_base = OTHER; note = 2'-O-methyluridine-3'-phosphate
  modified_base 14: mod_base = OTHER; note = 2'-O-methyluridine-3'-phosphate
  modified_base 15: mod_base = OTHER; note = 2'-O-methyluridine-3'-phosphate
  modified_base 16: mod_base = OTHER; note = 2'-O-methyladenosine-3'-phosphate
  modified_base 17: mod_base = OTHER; note = 2'-O-methyladenosine-3'-phosphate
  modified_base 18: mod_base = OTHER; note = 2'-O-methylcytidine-3'-phosphate
  modified_base 19: mod_base = OTHER; note = 2'-O-methyluridine-3'-phosphate
  modified_base 20: mod_base = OTHER; note = 2'-O-methylcytidine-3'-phosphate
  modified_base 21: mod_base = OTHER; note = 2'-O-methyladenosine-3'-phosphate attached to N-[tris(N-acetylgalactosamine-alkyl)-amidodecanoyl)]-4-hydr oxyprolinol (Hyp-(GalNAc-alkyl)3)
aggactctattctttaactca

SEQ ID NO: 260 - RNA, 21 nt, synthetic construct
  misc_feature 1..21: note = Description of Artificial Sequence: Synthetic oligonucleotide
  source 1..21: mol_type = other RNA
  modified_base 1: mod_base = OTHER; note = 2'-O-methyluridine-3'-phosphorothioate
  modified_base 2: mod_base = OTHER; note = 2'-O-methylguanosine-3'-phosphorothioate
  modified_base 3: mod_base = OTHER; note = 2'-O-methyluridine-3'-phosphate
  modified_base 4: mod_base = OTHER; note = 2'-O-methyladenosine-3'-phosphate
  modified_base 5: mod_base = OTHER; note = 2'-O-methyladenosine-3'-phosphate
  modified_base 6: mod_base = OTHER; note = 2'-O-methyluridine-3'-phosphate
  modified_base 7: mod_base = OTHER; note = 2'-fluorouridine-3'-phosphate
  modified_base 8: mod_base = OTHER; note = 2'-O-methyluridine-3'-phosphate
  modified_base 9: mod_base = OTHER; note = 2'-fluorouridine-3'-phosphate
  modified_base 10: mod_base = OTHER; note = 2'-fluoroadenosine-3'-phosphate
  modified_base 11: mod_base = OTHER; note = 2'-fluorocytidine-3'-phosphate
  modified_base 12: mod_base = OTHER; note = 2'-O-methyladenosine-3'-phosphate
  modified_base 13: mod_base = OTHER; note = 2'-O-methylcytidine-3'-phosphate
  modified_base 14: mod_base = OTHER; note = 2'-O-methylguanosine-3'-phosphate
  modified_base 15: mod_base = OTHER; note = 2'-O-methylcytidine-3'-phosphate
  modified_base 16: mod_base = OTHER; note = 2'-O-methyluridine-3'-phosphate
  modified_base 17: mod_base = OTHER; note = 2'-O-methyluridine-3'-phosphate
  modified_base 18: mod_base = OTHER; note = 2'-O-methyluridine-3'-phosphate
  modified_base 19: mod_base = OTHER; note = 2'-O-methyluridine-3'-phosphate
  modified_base 20: mod_base = OTHER; note = 2'-O-methylguanosine-3'-phosphate
  modified_base 21: mod_base = OTHER; note = 2'-O-methyluridine-3'-phosphate attached to N-[tris(N-acetylgalactosamine-alkyl)-amidodecanoyl)]-4-hydr oxyprolinol (Hyp-(GalNAc-alkyl)3)
tgtaattttacacgcttttgt

SEQ ID NO: 261 - RNA, 21 nt, synthetic construct
  misc_feature 1..21: note = Description of Artificial Sequence: Synthetic oligonucleotide
  source 1..21: mol_type = other RNA
  modified_base 1: mod_base = OTHER; note = 2'-O-methyladenosine-3'-phosphorothioate
  modified_base 2: mod_base = OTHER; note = 2'-O-methylguanosine-3'-phosphorothioate
  modified_base 3: mod_base = OTHER; note = 2'-O-methyluridine-3'-phosphate
  modified_base 4: mod_base = OTHER; note = 2'-O-methylcytidine-3'-phosphate
  modified_base 5: mod_base = OTHER; note = 2'-O-methylcytidine-3'-phosphate
  modified_base 6: mod_base = OTHER; note = 2'-O-methyluridine-3'-phosphate
  modified_base 7: mod_base = OTHER; note = 2'-fluoroguanosine-3'-phosphate
  modified_base 8: mod_base = OTHER; note = 2'-O-methylguanosine-3'-phosphate
  modified_base 9: mod_base = OTHER; note = 2'-fluoroadenosine-3'-phosphate
  modified_base 10: mod_base = OTHER; note = 2'-fluorouridine-3'-phosphate
  modified_base 11: mod_base = OTHER; note = 2'-fluoroguanosine-3'-phosphate
  modified_base 12: mod_base = OTHER; note = 2'-O-methyladenosine-3'-phosphate
  modified_base 13: mod_base = OTHER; note = 2'-O-methyluridine-3'-phosphate
  modified_base 14: mod_base = OTHER; note = 2'-O-methyladenosine-3'-phosphate
  modified_base 15: mod_base = OTHER; note = 2'-O-methylcytidine-3'-phosphate
  modified_base 16: mod_base = OTHER; note = 2'-O-methyluridine-3'-phosphate
  modified_base 17: mod_base = OTHER; note = 2'-O-methyladenosine-3'-phosphate
  modified_base 18: mod_base = OTHER; note = 2'-O-methyladenosine-3'-phosphate
  modified_base 19: mod_base = OTHER; note = 2'-O-methyluridine-3'-phosphate
  modified_base 20: mod_base = OTHER; note = 2'-O-methyladenosine-3'-phosphate
  modified_base 21: mod_base = OTHER; note = 2'-O-methyladenosine-3'-phosphate attached to N-[tris(N-acetylgalactosamine-alkyl)-amidodecanoyl)]-4-hydr oxyprolinol (Hyp-(GalNAc-alkyl)3)
agtcctggatgatactaataa

SEQ ID NO: 262 - RNA, 21 nt, synthetic construct
  misc_feature 1..21: note = Description of Artificial Sequence: Synthetic oligonucleotide
  source 1..21: mol_type = other RNA
  modified_base 1: mod_base = OTHER; note = 2'-O-methyluridine-3'-phosphorothioate
  modified_base 2: mod_base = OTHER; note = 2'-O-methyladenosine-3'-phosphorothioate
  modified_base 3: mod_base = OTHER; note = 2'-O-methyluridine-3'-phosphate
  modified_base 4: mod_base = OTHER; note = 2'-O-methyladenosine-3'-phosphate
  modified_base 5: mod_base = OTHER; note = 2'-O-methylguanosine-3'-phosphate
  modified_base 6: mod_base = OTHER; note = 2'-O-methyluridine-3'-phosphate
  modified_base 7: mod_base = OTHER; note = 2'-fluorouridine-3'-phosphate
  modified_base 8: mod_base = OTHER; note = 2'-O-methyladenosine-3'-phosphate
  modified_base 9: mod_base = OTHER; note = 2'-fluoroadenosine-3'-phosphate
  modified_base 10: mod_base = OTHER; note = 2'-fluorocytidine-3'-phosphate
  modified_base 11: mod_base = OTHER; note = 2'-fluoroadenosine-3'-phosphate
  modified_base 12: mod_base = OTHER; note = 2'-O-methylcytidine-3'-phosphate
  modified_base 13: mod_base = OTHER; note = 2'-O-methyladenosine-3'-phosphate
  modified_base 14: mod_base = OTHER; note = 2'-O-methylcytidine-3'-phosphate
  modified_base 15: mod_base = OTHER; note = 2'-O-methyluridine-3'-phosphate
  modified_base 16: mod_base = OTHER; note = 2'-O-methyladenosine-3'-phosphate
  modified_base 17: mod_base = OTHER; note = 2'-O-methylcytidine-3'-phosphate
  modified_base 18: mod_base = OTHER; note = 2'-O-methylcytidine-3'-phosphate
  modified_base 19: mod_base = OTHER; note = 2'-O-methylguanosine-3'-phosphate
  modified_base 20: mod_base = OTHER; note = 2'-O-methyladenosine-3'-phosphate
  modified_base 21: mod_base = OTHER; note = 2'-O-methyladenosine-3'-phosphate attached to N-[tris(N-acetylgalactosamine-alkyl)-amidodecanoyl)]-4-hydr oxyprolinol (Hyp-(GalNAc-alkyl)3)
tatagttaacacactaccgaa

SEQ ID NO: 263 - RNA, 21 nt, synthetic construct
  misc_feature 1..21: note = Description of Artificial Sequence: Synthetic oligonucleotide
  source 1..21: mol_type = other RNA
  modified_base 1: mod_base = OTHER; note = 2'-O-methyladenosine-3'-phosphorothioate
  modified_base 2: mod_base = OTHER; note = 2'-O-methyladenosine-3'-phosphorothioate
  modified_base 3: mod_base = OTHER; note = 2'-O-methyladenosine-3'-phosphate
  modified_base 4: mod_base = OTHER; note = 2'-O-methyladenosine-3'-phosphate
  modified_base 5: mod_base = OTHER; note = 2'-O-methyluridine-3'-phosphate
  modified_base 6: mod_base = OTHER; note = 2'-O-methylcytidine-3'-phosphate
  modified_base 7: mod_base = OTHER; note = 2'-fluorouridine-3'-phosphate
  modified_base 8: mod_base = OTHER; note = 2'-O-methyluridine-3'-phosphate
  modified_base 9: mod_base = OTHER; note = 2'-fluoroguanosine-3'-phosphate
  modified_base 10: mod_base = OTHER; note = 2'-fluoroadenosine-3'-phosphate
  modified_base 11: mod_base = OTHER; note = 2'-fluorouridine-3'-phosphate
  modified_base 12: mod_base = OTHER; note = 2'-O-methylcytidine-3'-phosphate
  modified_base 13: mod_base = OTHER; note = 2'-O-methyladenosine-3'-phosphate
  modified_base 14: mod_base = OTHER; note = 2'-O-methylguanosine-3'-phosphate
  modified_base 15: mod_base = OTHER; note = 2'-O-methyluridine-3'-phosphate
  modified_base 16: mod_base = OTHER; note = 2'-O-methyluridine-3'-phosphate
  modified_base 17: mod_base = OTHER; note = 2'-O-methyladenosine-3'-phosphate
  modified_base 18: mod_base = OTHER; note = 2'-O-methyladenosine-3'-phosphate
  modified_base 19: mod_base = OTHER; note = 2'-O-methylguanosine-3'-phosphate
  modified_base 20: mod_base = OTHER; note = 2'-O-methyladenosine-3'-phosphate
  modified_base 21: mod_base = OTHER; note = 2'-O-methyladenosine-3'-phosphate attached to N-[tris(N-acetylgalactosamine-alkyl)-amidodecanoyl)]-4-hydr oxyprolinol (Hyp-(GalNAc-alkyl)3)
aaaatcttgatcagttaagaa

SEQ ID NO: 264 - RNA, 21 nt, synthetic construct
  misc_feature 1..21: note = Description of Artificial Sequence: Synthetic oligonucleotide
  source 1..21: mol_type = other RNA
  modified_base 1: mod_base = OTHER; note = 2'-O-methyladenosine-3'-phosphorothioate
  modified_base 2: mod_base = OTHER; note = 2'-O-methylcytidine-3'-phosphorothioate
  modified_base 3: mod_base = OTHER; note = 2'-O-methyluridine-3'-phosphate
  modified_base 4: mod_base = OTHER; note = 2'-O-methylcytidine-3'-phosphate
  modified_base 5: mod_base = OTHER; note = 2'-O-methyladenosine-3'-phosphate
  modified_base 6: mod_base = OTHER; note = 2'-O-methyladenosine-3'-phosphate
  modified_base 7: mod_base = OTHER; note = 2'-fluoroadenosine-3'-phosphate
  modified_base 8: mod_base = OTHER; note = 2'-O-methylguanosine-3'-phosphate
  modified_base 9: mod_base = OTHER; note = 2'-fluorocytidine-3'-phosphate
  modified_base 10: mod_base = OTHER; note = 2'-fluoroadenosine-3'-phosphate
  modified_base 11: mod_base = OTHER; note = 2'-fluorouridine-3'-phosphate
  modified_base 12: mod_base = OTHER; note = 2'-O-methylguanosine-3'-phosphate
  modified_base 13: mod_base = OTHER; note = 2'-O-methylguanosine-3'-phosphate
  modified_base 14: mod_base = OTHER; note = 2'-O-methylguanosine-3'-phosphate
  modified_base 15: mod_base = OTHER; note = 2'-O-methyladenosine-3'-phosphate
  modified_base 16: mod_base = OTHER; note = 2'-O-methyluridine-3'-phosphate
  modified_base 17: mod_base = OTHER; note = 2'-O-methyluridine-3'-phosphate
  modified_base 18: mod_base = OTHER; note = 2'-O-methyladenosine-3'-phosphate
  modified_base 19: mod_base = OTHER; note = 2'-O-methyluridine-3'-phosphate
  modified_base 20: mod_base = OTHER; note = 2'-O-methyluridine-3'-phosphate
  modified_base 21: mod_base = OTHER; note = 2'-O-methyladenosine-3'-phosphate attached to N-[tris(N-acetylgalactosamine-alkyl)-amidodecanoyl)]-4-hydr oxyprolinol (Hyp-(GalNAc-alkyl)3)
actcaaagcatgggattatta

SEQ ID NO: 265 - RNA, 21 nt, synthetic construct
  misc_feature 1..21: note = Description of Artificial Sequence: Synthetic oligonucleotide
  source 1..21: mol_type = other RNA
  modified_base 1: mod_base = OTHER; note = 2'-O-methyluridine-3'-phosphorothioate
  modified_base 2: mod_base = OTHER; note = 2'-O-methylcytidine-3'-phosphorothioate
  modified_base 3: mod_base = OTHER; note = 2'-O-methylcytidine-3'-phosphate
  modified_base 4: mod_base = OTHER; note = 2'-O-methylcytidine-3'-phosphate
  modified_base 5: mod_base = OTHER; note = 2'-O-methyladenosine-3'-phosphate
  modified_base 6: mod_base = OTHER; note = 2'-O-methyluridine-3'-phosphate
  modified_base 7: mod_base = OTHER; note = 2'-fluorouridine-3'-phosphate
  modified_base 8: mod_base = OTHER; note = 2'-O-methyladenosine-3'-phosphate
  modified_base 9: mod_base = OTHER; note = 2'-fluorocytidine-3'-phosphate
  modified_base 10: mod_base = OTHER; note = 2'-fluorocytidine-3'-phosphate
  modified_base 11: mod_base = OTHER; note = 2'-fluoroadenosine-3'-phosphate
  modified_base 12: mod_base = OTHER; note = 2'-O-methyluridine-3'-phosphate
  modified_base 13: mod_base = OTHER; note = 2'-O-methylguanosine-3'-phosphate
  modified_base 14: mod_base = OTHER; note = 2'-O-methyluridine-3'-phosphate
  modified_base 15: mod_base = OTHER; note = 2'-O-methyladenosine-3'-phosphate
  modified_base 16: mod_base = OTHER; note = 2'-O-methyladenosine-3'-phosphate
  modified_base 17: mod_base = OTHER; note = 2'-O-methyluridine-3'-phosphate
  modified_base 18: mod_base = OTHER; note = 2'-O-methylguanosine-3'-phosphate
  modified_base 19: mod_base = OTHER; note = 2'-O-methylguanosine-3'-phosphate
  modified_base 20: mod_base = OTHER; note = 2'-O-methylcytidine-3'-phosphate
  modified_base 21: mod_base = OTHER; note = 2'-O-methyladenosine-3'-phosphate attached to N-[tris(N-acetylgalactosamine-alkyl)-amidodecanoyl)]-4-hydr oxyprolinol (Hyp-(GalNAc-alkyl)3)
tcccattaccatgtaatggca

SEQ ID NO: 266 - RNA, 21 nt, synthetic construct
  misc_feature 1..21: note = Description of Artificial Sequence: Synthetic oligonucleotide
  source 1..21: mol_type = other RNA
  modified_base 1: mod_base = OTHER; note = 2'-O-methyluridine-3'-phosphorothioate
  modified_base 2: mod_base = OTHER; note = 2'-O-methyluridine-3'-phosphorothioate
  modified_base 3: mod_base = OTHER; note = 2'-O-methyluridine-3'-phosphate
  modified_base 4: mod_base = OTHER; note = 2'-O-methylguanosine-3'-phosphate
  modified_base 5: mod_base = OTHER; note = 2'-O-methyluridine-3'-phosphate
  modified_base 6: mod_base = OTHER; note = 2'-O-methyluridine-3'-phosphate
  modified_base 7: mod_base = OTHER; note = 2'-fluoroguanosine-3'-phosphate
  modified_base 8: mod_base = OTHER; note = 2'-O-methyladenosine-3'-phosphate
  modified_base 9: mod_base = OTHER; note = 2'-fluorocytidine-3'-phosphate
  modified_base 10: mod_base = OTHER; note = 2'-fluoroadenosine-3'-phosphate
  modified_base 11: mod_base = OTHER; note = 2'-fluorouridine-3'-phosphate
  modified_base 12: mod_base = OTHER; note = 2'-O-methyluridine-3'-phosphate
  modified_base 13: mod_base = OTHER; note = 2'-O-methyladenosine-3'-phosphate
  modified_base 14: mod_base = OTHER; note = 2'-O-methylguanosine-3'-phosphate
  modified_base 15: mod_base = OTHER; note = 2'-O-methyluridine-3'-phosphate
  modified_base 16: mod_base = OTHER; note = 2'-O-methylcytidine-3'-phosphate
  modified_base 17: mod_base = OTHER; note = 2'-O-methyluridine-3'-phosphate
  modified_base 18: mod_base = OTHER; note = 2'-O-methylcytidine-3'-phosphate
  modified_base 19: mod_base = OTHER; note = 2'-O-methyladenosine-3'-phosphate
  modified_base 20: mod_base = OTHER; note = 2'-O-methylguanosine-3'-phosphate
  modified_base 21: mod_base = OTHER; note = 2'-O-methyluridine-3'-phosphate attached to N-[tris(N-acetylgalactosamine-alkyl)-amidodecanoyl)]-4-hydr oxyprolinol (Hyp-(GalNAc-alkyl)3)
tttgttgacattagtctcagt

SEQ ID NO: 267 - RNA, 21 nt, synthetic construct
  misc_feature 1..21: note = Description of Artificial Sequence: Synthetic oligonucleotide
  source 1..21: mol_type = other RNA
  modified_base 1: mod_base = OTHER; note = 2'-O-methylguanosine-3'-phosphorothioate
  modified_base 2: mod_base = OTHER; note = 2'-O-methyladenosine-3'-phosphorothioate
  modified_base 3: mod_base = OTHER; note = 2'-O-methylguanosine-3'-phosphate
  modified_base 4: mod_base = OTHER; note = 2'-O-methyluridine-3'-phosphate
  modified_base 5: mod_base = OTHER; note = 2'-O-methylcytidine-3'-phosphate
  modified_base 6: mod_base = OTHER; note = 2'-O-methylcytidine-3'-phosphate
  modified_base 7: mod_base = OTHER; note = 2'-fluorouridine-3'-phosphate
  modified_base 8: mod_base = OTHER; note = 2'-O-methylguanosine-3'-phosphate
  modified_base 9: mod_base = OTHER; note = 2'-fluoroguanosine-3'-phosphate
  modified_base 10: mod_base = OTHER; note = 2'-fluoroadenosine-3'-phosphate
  modified_base 11: mod_base = OTHER; note = 2'-fluorouridine-3'-phosphate
  modified_base 12: mod_base = OTHER; note = 2'-O-methylguanosine-3'-phosphate
  modified_base 13: mod_base = OTHER; note = 2'-O-methyladenosine-3'-phosphate
  modified_base 14: mod_base = OTHER; note = 2'-O-methyluridine-3'-phosphate
  modified_base 15: mod_base = OTHER; note = 2'-O-methyladenosine-3'-phosphate
  modified_base 16: mod_base = OTHER; note = 2'-O-methylcytidine-3'-phosphate
  modified_base 17: mod_base = OTHER; note = 2'-O-methyluridine-3'-phosphate
  modified_base 18: mod_base = OTHER; note = 2'-O-methyladenosine-3'-phosphate
  modified_base 19: mod_base = OTHER; note = 2'-O-methyladenosine-3'-phosphate
  modified_base 20: mod_base = OTHER; note = 2'-O-methyluridine-3'-phosphate
  modified_base 21: mod_base = OTHER; note = 2'-O-methyladenosine-3'-phosphate attached to N-[tris(N-acetylgalactosamine-alkyl)-amidodecanoyl)]-4-hydr oxyprolinol (Hyp-(GalNAc-alkyl)3)
gagtcctggatgatactaata

SEQ ID NO: 268 - RNA, 21 nt, synthetic construct
  misc_feature 1..21: note = Description of Artificial Sequence: Synthetic oligonucleotide
  source 1..21: mol_type = other RNA
  modified_base 1: mod_base = OTHER; note = 2'-O-methyluridine-3'-phosphorothioate
  modified_base 2: mod_base = OTHER; note = 2'-O-methyluridine-3'-phosphorothioate
  modified_base 3: mod_base = OTHER; note = 2'-O-methyluridine-3'-phosphate
  modified_base 4: mod_base = OTHER; note = 2'-O-methyluridine-3'-phosphate
  modified_base 5: mod_base = OTHER; note = 2'-O-methyluridine-3'-phosphate
  modified_base 6: mod_base = OTHER; note = 2'-O-methyladenosine-3'-phosphate
  modified_base 7: mod_base = OTHER; note = 2'-fluoroadenosine-3'-phosphate
  modified_base 8: mod_base = OTHER; note = 2'-O-methyladenosine-3'-phosphate
  modified_base 9: mod_base = OTHER; note = 2'-fluorocytidine-3'-phosphate
  modified_base 10: mod_base = OTHER; note = 2'-fluorouridine-3'-phosphate
  modified_base 11: mod_base = OTHER; note = 2'-fluoroguanosine-3'-phosphate
  modified_base 12: mod_base = OTHER; note = 2'-O-methyluridine-3'-phosphate
  modified_base 13: mod_base = OTHER; note = 2'-O-methyladenosine-3'-phosphate
  modified_base 14: mod_base = OTHER; note = 2'-O-methylcytidine-3'-phosphate
  modified_base 15: mod_base = OTHER; note = 2'-O-methyladenosine-3'-phosphate
  modified_base 16: mod_base = OTHER; note = 2'-O-methylguanosine-3'-phosphate
  modified_base 17: mod_base = OTHER; note = 2'-O-methyluridine-3'-phosphate
  modified_base 18: mod_base = OTHER; note = 2'-O-methylguanosine-3'-phosphate
  modified_base 19: mod_base = OTHER; note = 2'-O-methyluridine-3'-phosphate
  modified_base 20: mod_base = OTHER; note = 2'-O-methylcytidine-3'-phosphate
  modified_base 21: mod_base = OTHER; note = 2'-O-methyluridine-3'-phosphate attached to N-[tris(N-acetylgalactosamine-alkyl)-amidodecanoyl)]-4-hydr oxyprolinol (Hyp-(GalNAc-alkyl)3)
tttttaaactgtacagtgtct

SEQ ID NO: 269 - RNA, 21 nt, synthetic construct
  misc_feature 1..21: note = Description of Artificial Sequence: Synthetic oligonucleotide
  source 1..21: mol_type = other RNA
  modified_base 1: mod_base = OTHER; note = 2'-O-methyluridine-3'-phosphorothioate
  modified_base 2: mod_base = OTHER; note = 2'-O-methyluridine-3'-phosphorothioate
  modified_base 3: mod_base = OTHER; note = 2'-O-methylguanosine-3'-phosphate
  modified_base 4: mod_base = OTHER; note = 2'-O-methyluridine-3'-phosphate
  modified_base 5: mod_base = OTHER; note = 2'-O-methyladenosine-3'-phosphate
  modified_base 6: mod_base = OTHER; note = 2'-O-methyluridine-3'-phosphate
  modified_base 7: mod_base = OTHER; note = 2'-fluoroadenosine-3'-phosphate
  modified_base 8: mod_base = OTHER; note = 2'-O-methylguanosine-3'-phosphate
  modified_base 9: mod_base = OTHER; note = 2'-fluorouridine-3'-phosphate
  modified_base 10: mod_base = OTHER; note = 2'-fluorouridine-3'-phosphate
  modified_base 11: mod_base = OTHER; note = 2'-fluoroadenosine-3'-phosphate
  modified_base 12: mod_base = OTHER; note = 2'-O-methyladenosine-3'-phosphate
  modified_base 13: mod_base = OTHER; note = 2'-O-methylcytidine-3'-phosphate
  modified_base 14: mod_base = OTHER; note = 2'-O-methyladenosine-3'-phosphate
  modified_base 15: mod_base = OTHER; note = 2'-O-methylcytidine-3'-phosphate
  modified_base 16: mod_base = OTHER; note = 2'-O-methyladenosine-3'-phosphate
  modified_base 17: mod_base = OTHER; note = 2'-O-methylcytidine-3'-phosphate
  modified_base 18: mod_base = OTHER; note = 2'-O-methyluridine-3'-phosphate
  modified_base 19: mod_base = OTHER; note = 2'-O-methyladenosine-3'-phosphate
  modified_base 20: mod_base = OTHER; note = 2'-O-methylcytidine-3'-phosphate
  modified_base 21: mod_base = OTHER; note = 2'-O-methyladenosine-3'-phosphate attached to N-[tris(N-acetylgalactosamine-alkyl)-amidodecanoyl)]-4-hydr oxyprolinol (Hyp-(GalNAc-alkyl)3)
ttgtatagttaacacactaca

SEQ ID NO: 270 - RNA, 21 nt, synthetic construct
  misc_feature 1..21: note = Description of Artificial Sequence: Synthetic oligonucleotide
  source 1..21: mol_type = other RNA
  modified_base 1: mod_base = OTHER; note = 2'-O-methyluridine-3'-phosphorothioate
  modified_base 2: mod_base = OTHER; note = 2'-O-methyluridine-3'-phosphorothioate
  modified_base 3: mod_base = OTHER; note = 2'-O-methyladenosine-3'-phosphate
  modified_base 4: mod_base = OTHER; note = 2'-O-methyladenosine-3'-phosphate
  modified_base 5: mod_base = OTHER; note = 2'-O-methylcytidine-3'-phosphate
  modified_base 6: mod_base = OTHER; note = 2'-O-methyladenosine-3'-phosphate
  modified_base 7: mod_base = OTHER; note = 2'-fluorocytidine-3'-phosphate
  modified_base 8: mod_base = OTHER; note = 2'-O-methyladenosine-3'-phosphate
  modified_base 9: mod_base = OTHER; note = 2'-fluorocytidine-3'-phosphate
  modified_base 10: mod_base = OTHER; note = 2'-fluorouridine-3'-phosphate
  modified_base 11: mod_base = OTHER; note = 2'-fluoroadenosine-3'-phosphate
  modified_base 12: mod_base = OTHER; note = 2'-O-methylcytidine-3'-phosphate
  modified_base 13: mod_base = OTHER; note = 2'-O-methylcytidine-3'-phosphate
  modified_base 14: mod_base = OTHER; note = 2'-O-methylguanosine-3'-phosphate
  modified_base 15: mod_base = OTHER; note = 2'-O-methyladenosine-3'-phosphate
  modified_base 16: mod_base = OTHER; note = 2'-O-methyladenosine-3'-phosphate
  modified_base 17: mod_base = OTHER; note = 2'-O-methyluridine-3'-phosphate
  modified_base 18: mod_base = OTHER; note = 2'-O-methylguanosine-3'-phosphate
  modified_base 19: mod_base = OTHER; note = 2'-O-methyluridine-3'-phosphate
  modified_base 20: mod_base = OTHER; note = 2'-O-methylguanosine-3'-phosphate
  modified_base 21: mod_base = OTHER; note = 2'-O-methyluridine-3'-phosphate attached to N-[tris(N-acetylgalactosamine-alkyl)-amidodecanoyl)]-4-hydr oxyprolinol (Hyp-(GalNAc-alkyl)3)
ttaacacactaccgaatgtgt

SEQ ID NO: 271 - RNA, 21 nt, synthetic construct
  misc_feature 1..21: note = Description of Artificial Sequence: Synthetic oligonucleotide
  source 1..21: mol_type = other RNA
  modified_base 1: mod_base = OTHER; note = 2'-O-methylguanosine-3'-phosphorothioate
  modified_base 2: mod_base = OTHER; note = 2'-O-methyluridine-3'-phosphorothioate
  modified_base 3: mod_base = OTHER; note = 2'-O-methyluridine-3'-phosphate
  modified_base 4: mod_base = OTHER; note = 2'-O-methyladenosine-3'-phosphate
  modified_base 5: mod_base = OTHER; note = 2'-O-methyladenosine-3'-phosphate
  modified_base 6: mod_base = OTHER; note = 2'-O-methylguanosine-3'-phosphate
  modified_base 7: mod_base = OTHER; note = 2'-fluorouridine-3'-phosphate
  modified_base 8: mod_base = OTHER; note = 2'-O-methyluridine-3'-phosphate
  modified_base 9: mod_base = OTHER; note = 2'-fluoroguanosine-3'-phosphate
  modified_base 10: mod_base = OTHER; note = 2'-fluoroadenosine-3'-phosphate
  modified_base 11: mod_base = OTHER; note = 2'-fluoroguanosine-3'-phosphate
  modified_base 12: mod_base = OTHER; note = 2'-O-methyladenosine-3'-phosphate
  modified_base 13: mod_base = OTHER; note = 2'-O-methyluridine-3'-phosphate
  modified_base 14: mod_base = OTHER; note = 2'-O-methyladenosine-3'-phosphate
  modified_base 15: mod_base = OTHER; note = 2'-O-methylguanosine-3'-phosphate
  modified_base 16: mod_base = OTHER; note = 2'-O-methyluridine-3'-phosphate
  modified_base 17: mod_base = OTHER; note = 2'-O-methyluridine-3'-phosphate
  modified_base 18: mod_base = OTHER; note = 2'-O-methyluridine-3'-phosphate
  modified_base 19: mod_base = OTHER; note = 2'-O-methyluridine-3'-phosphate
  modified_base 20: mod_base = OTHER; note = 2'-O-methylcytidine-3'-phosphate
  modified_base 21: mod_base = OTHER; note = 2'-O-methyladenosine-3'-phosphate attached to N-[tris(N-acetylgalactosamine-alkyl)-amidodecanoyl)]-4-hydr oxyprolinol (Hyp-(GalNAc-alkyl)3)
gttaagttgagatagttttca

SEQ ID NO: 272 - RNA, 21 nt, synthetic construct
  misc_feature 1..21: note = Description of Artificial Sequence: Synthetic oligonucleotide
  source 1..21: mol_type = other RNA
  modified_base 1: mod_base = OTHER; note = 2'-O-methyluridine-3'-phosphorothioate
  modified_base 2: mod_base = OTHER; note = 2'-O-methylguanosine-3'-phosphorothioate
  modified_base 3: mod_base = OTHER; note = 2'-O-methyladenosine-3'-phosphate
  modified_base 4: mod_base = OTHER; note = 2'-O-methyladenosine-3'-phosphate
  modified_base 5: mod_base = OTHER; note = 2'-O-methyladenosine-3'-phosphate
  modified_base 6: mod_base = OTHER; note = 2'-O-methyladenosine-3'-phosphate
  modified_base 7: mod_base = OTHER; note = 2'-fluorouridine-3'-phosphate
  modified_base 8: mod_base = OTHER; note = 2'-O-methylguanosine-3'-phosphate
  modified_base 9: mod_base = OTHER; note = 2'-fluorocytidine-3'-phosphate
  modified_base 10: mod_base = OTHER; note = 2'-fluorouridine-3'-phosphate
  modified_base 11: mod_base = OTHER; note = 2'-fluoroguanosine-3'-phosphate
  modified_base 12: mod_base = OTHER; note = 2'-O-methylguanosine-3'-phosphate
  modified_base 13: mod_base = OTHER; note = 2'-O-methylcytidine-3'-phosphate
  modified_base 14: mod_base = OTHER; note = 2'-O-methyluridine-3'-phosphate
  modified_base 15: mod_base = OTHER; note = 2'-O-methyladenosine-3'-phosphate
  modified_base 16: mod_base = OTHER; note = 2'-O-methyluridine-3'-phosphate
  modified_base 17: mod_base = OTHER; note = 2'-O-methyladenosine-3'-phosphate
  modified_base 18: mod_base = OTHER; note = 2'-O-methylguanosine-3'-phosphate
  modified_base 19: mod_base = OTHER; note = 2'-O-methyladenosine-3'-phosphate
  modified_base 20: mod_base = OTHER; note = 2'-O-methyluridine-3'-phosphate
  modified_base 21: mod_base = OTHER; note = 2'-O-methyladenosine-3'-phosphate attached to N-[tris(N-acetylgalactosamine-alkyl)-amidodecanoyl)]-4-hydr oxyprolinol (Hyp-(GalNAc-alkyl)3)
tgaaaatgctggctatagata

SEQ ID NO: 273 - RNA, 21 nt, synthetic construct
  misc_feature 1..21: note = Description of Artificial Sequence: Synthetic oligonucleotide
  source 1..21: mol_type = other RNA
  modified_base 1: mod_base = OTHER; note = 2'-O-methyladenosine-3'-phosphorothioate
  modified_base 2: mod_base = OTHER; note = 2'-O-methylguanosine-3'-phosphorothioate
  modified_base 3: mod_base = OTHER; note = 2'-O-methylguanosine-3'-phosphate
  modified_base 4: mod_base = OTHER; note = 2'-O-methyladenosine-3'-phosphate
  modified_base 5: mod_base = OTHER; note = 2'-O-methylguanosine-3'-phosphate
  modified_base 6: mod_base = OTHER; note = 2'-O-methylguanosine-3'-phosphate
  modified_base 7: mod_base = OTHER; note = 2'-fluoroadenosine-3'-phosphate
  modified_base 8: mod_base = OTHER; note = 2'-O-methyladenosine-3'-phosphate
  modified_base 9: mod_base = OTHER; note = 2'-fluorouridine-3'-phosphate
  modified_base 10: mod_base = OTHER; note = 2'-fluoroadenosine-3'-phosphate
  modified_base 11: mod_base = OTHER; note = 2'-fluorocytidine-3'-phosphate
  modified_base 12: mod_base = OTHER; note = 2'-O-methyluridine-3'-phosphate
  modified_base 13: mod_base = OTHER; note = 2'-O-methylguanosine-3'-phosphate
  modified_base 14: mod_base = OTHER; note = 2'-O-methyladenosine-3'-phosphate
  modified_base 15: mod_base = OTHER; note = 2'-O-methyladenosine-3'-phosphate
  modified_base 16: mod_base = OTHER; note = 2'-O-methylcytidine-3'-phosphate
  modified_base 17: mod_base = OTHER; note = 2'-O-methyladenosine-3'-phosphate
  modified_base 18: mod_base = OTHER; note = 2'-O-methyluridine-3'-phosphate
  modified_base 19: mod_base = OTHER; note = 2'-O-methylcytidine-3'-phosphate
  modified_base 20: mod_base = OTHER; note = 2'-O-methyluridine-3'-phosphate
  modified_base 21: mod_base = OTHER; note = 2'-O-methyladenosine-3'-phosphate attached to N-[tris(N-acetylgalactosamine-alkyl)-amidodecanoyl)]-4-hydr oxyprolinol (Hyp-(GalNAc-alkyl)3)
aggaggaatactgaacatcta

SEQ ID NO: 274 - RNA, 21 nt, synthetic construct
  misc_feature 1..21: note = Description of Artificial Sequence: Synthetic oligonucleotide
  source 1..21: mol_type = other RNA
  modified_base 1: mod_base = OTHER; note = 2'-O-methyluridine-3'-phosphorothioate
  modified_base 2: mod_base = OTHER; note = 2'-O-methyluridine-3'-phosphorothioate
  modified_base 3: mod_base = OTHER; note = 2'-O-methyluridine-3'-phosphate
  modified_base 4: mod_base = OTHER; note = 2'-O-methylguanosine-3'-phosphate
  modified_base 5: mod_base = OTHER; note = 2'-O-methyluridine-3'-phosphate
  modified_base 6: mod_base = OTHER; note = 2'-O-methyladenosine-3'-phosphate
  modified_base 7: mod_base = OTHER; note = 2'-fluorouridine-3'-phosphate
  modified_base 8: mod_base = OTHER; note = 2'-O-methyladenosine-3'-phosphate
  modified_base 9: mod_base = OTHER; note = 2'-fluoroguanosine-3'-phosphate
  modified_base 10: mod_base = OTHER; note = 2'-fluorouridine-3'-phosphate
  modified_base 11: mod_base = OTHER; note = 2'-fluorouridine-3'-phosphate
  modified_base 12: mod_base = OTHER; note = 2'-O-methyladenosine-3'-phosphate
  modified_base 13: mod_base = OTHER; note = 2'-O-methyladenosine-3'-phosphate
  modified_base 14: mod_base = OTHER; note = 2'-O-methylcytidine-3'-phosphate
  modified_base 15: mod_base = OTHER; note = 2'-O-methyladenosine-3'-phosphate
  modified_base 16: mod_base = OTHER; note = 2'-O-methylcytidine-3'-phosphate
  modified_base 17: mod_base = OTHER; note = 2'-O-methyladenosine-3'-phosphate
  modified_base 18: mod_base = OTHER; note = 2'-O-methylcytidine-3'-phosphate
  modified_base 19: mod_base = OTHER; note = 2'-O-methyluridine-3'-phosphate
  modified_base 20: mod_base = OTHER; note = 2'-O-methyladenosine-3'-phosphate
  modified_base 21: mod_base = OTHER; note = 2'-O-methyladenosine-3'-phosphate attached to N-[tris(N-acetylgalactosamine-alkyl)-amidodecanoyl)]-4-hydr oxyprolinol (Hyp-(GalNAc-alkyl)3)
tttgtatagttaacacactaa

SEQ ID NO: 275 - RNA, 21 nt, synthetic construct
  misc_feature 1..21: note = Description of Artificial Sequence: Synthetic oligonucleotide
  source 1..21: mol_type = other RNA
  modified_base 1: mod_base = OTHER; note = 2'-O-methyladenosine-3'-phosphorothioate
  modified_base 2: mod_base = OTHER; note = 2'-O-methyladenosine-3'-phosphorothioate
  modified_base 3: mod_base = OTHER; note = 2'-O-methylguanosine-3'-phosphate
  modified_base 4: mod_base = OTHER; note = 2'-O-methyluridine-3'-phosphate
  modified_base 5: mod_base = OTHER; note = 2'-O-methyladenosine-3'-phosphate
  modified_base 6: mod_base = OTHER; note = 2'-O-methyluridine-3'-phosphate
  modified_base 7: mod_base = OTHER; note = 2'-fluoroguanosine-3'-phosphate
  modified_base 8: mod_base = OTHER; note = 2'-O-methyluridine-3'-phosphate
  modified_base 9: mod_base = OTHER; note = 2'-fluorouridine-3'-phosphate
  modified_base 10: mod_base = OTHER; note = 2'-fluorocytidine-3'-phosphate
  modified_base 11: mod_base = OTHER; note = 2'-fluorouridine-3'-phosphate
  modified_base 12: mod_base = OTHER; note = 2'-O-methyladenosine-3'-phosphate
  modified_base 13: mod_base = OTHER; note = 2'-O-methyladenosine-3'-phosphate
  modified_base 14: mod_base = OTHER; note = 2'-O-methylcytidine-3'-phosphate
  modified_base 15: mod_base = OTHER; note = 2'-O-methylcytidine-3'-phosphate
  modified_base 16: mod_base = OTHER; note = 2'-O-methyluridine-3'-phosphate
  modified_base 17: mod_base = OTHER; note = 2'-O-methyluridine-3'-phosphate
  modified_base 18: mod_base = OTHER; note = 2'-O-methyluridine-3'-phosphate
  modified_base 19: mod_base = OTHER; note = 2'-O-methyladenosine-3'-phosphate
  modified_base 20: mod_base = OTHER; note = 2'-O-methylcytidine-3'-phosphate
  modified_base 21: mod_base = OTHER; note = 2'-O-methyladenosine-3'-phosphate attached to N-[tris(N-acetylgalactosamine-alkyl)-amidodecanoyl)]-4-hydr oxyprolinol (Hyp-(GalNAc-alkyl)3)
aagtatgttctaacctttaca

SEQ ID NO: 276 - RNA, 21 nt, synthetic construct
  misc_feature 1..21: note = Description of Artificial Sequence: Synthetic oligonucleotide
  source 1..21: mol_type = other RNA
  modified_base 1: mod_base = OTHER; note = 2'-O-methyluridine-3'-phosphorothioate
  modified_base 2: mod_base = OTHER; note = 2'-O-methyladenosine-3'-phosphorothioate
  modified_base 3: mod_base = OTHER; note = 2'-O-methyladenosine-3'-phosphate
  modified_base 4: mod_base = OTHER; note = 2'-O-methyluridine-3'-phosphate
  modified_base 5: mod_base = OTHER; note = 2'-O-methyluridine-3'-phosphate
  modified_base 6: mod_base = OTHER; note = 2'-O-methyladenosine-3'-phosphate
  modified_base 7: mod_base = OTHER; note = 2'-fluoroadenosine-3'-phosphate
  modified_base 8: mod_base = OTHER; note = 2'-O-methyluridine-3'-phosphate
  modified_base 9: mod_base = OTHER; note = 2'-fluorouridine-3'-phosphate
  modified_base 10: mod_base = OTHER; note = 2'-fluoroguanosine-3'-phosphate
  modified_base 11: mod_base = OTHER; note = 2'-fluoroguanosine-3'-phosphate
  modified_base 12: mod_base = OTHER; note = 2'-O-methylguanosine-3'-phosphate
  modified_base 13: mod_base = OTHER; note = 2'-O-methylcytidine-3'-phosphate
  modified_base 14: mod_base = OTHER; note = 2'-O-methylcytidine-3'-phosphate
  modified_base 15: mod_base = OTHER; note = 2'-O-methyladenosine-3'-phosphate
  modified_base 16: mod_base = OTHER; note = 2'-O-methylguanosine-3'-phosphate
  modified_base 17: mod_base = OTHER; note = 2'-O-methylcytidine-3'-phosphate
  modified_base 18: mod_base = OTHER; note = 2'-O-methyluridine-3'-phosphate
  modified_base 19: mod_base = OTHER; note = 2'-O-methyluridine-3'-phosphate
  modified_base 20: mod_base = OTHER; note = 2'-O-methyluridine-3'-phosphate
  modified_base 21: mod_base = OTHER; note = 2'-O-methyluridine-3'-phosphate attached to N-[tris(N-acetylgalactosamine-alkyl)-amidodecanoyl)]-4-hydr oxyprolinol (Hyp-(GalNAc-alkyl)3)
taattaattgggccagctttt

SEQ ID NO: 277 - RNA, 21 nt, synthetic construct
  misc_feature 1..21: note = Description of Artificial Sequence: Synthetic oligonucleotide
  source 1..21: mol_type = other RNA
  modified_base 1: mod_base = OTHER; note = 2'-O-methylcytidine-3'-phosphorothioate
  modified_base 2: mod_base = OTHER; note = 2'-O-methyladenosine-3'-phosphorothioate
  modified_base 3: mod_base = OTHER; note = 2'-O-methyladenosine-3'-phosphate
  modified_base 4: mod_base = OTHER; note = 2'-O-methyladenosine-3'-phosphate
  modified_base 5: mod_base = OTHER; note = 2'-O-methylguanosine-3'-phosphate
  modified_base 6: mod_base = OTHER; note = 2'-O-methylcytidine-3'-phosphate
  modified_base 7: mod_base = OTHER; note = 2'-fluoroadenosine-3'-phosphate
  modified_base 8: mod_base = OTHER; note = 2'-O-methyluridine-3'-phosphate
  modified_base 9: mod_base = OTHER; note = 2'-fluoroguanosine-3'-phosphate
  modified_base 10: mod_base = OTHER; note = 2'-fluoroguanosine-3'-phosphate
  modified_base 11: mod_base = OTHER; note = 2'-fluoroguanosine-3'-phosphate
  modified_base 12: mod_base = OTHER; note = 2'-O-methyladenosine-3'-phosphate
  modified_base 13: mod_base = OTHER; note = 2'-O-methyluridine-3'-phosphate
  modified_base 14: mod_base = OTHER; note = 2'-O-methyluridine-3'-phosphate
  modified_base 15: mod_base = OTHER; note = 2'-O-methyladenosine-3'-phosphate
  modified_base 16: mod_base = OTHER; note = 2'-O-methyluridine-3'-phosphate
  modified_base 17: mod_base = OTHER; note = 2'-O-methyluridine-3'-phosphate
  modified_base 18: mod_base = OTHER; note = 2'-O-methyladenosine-3'-phosphate
  modified_base 19: mod_base = OTHER; note = 2'-O-methylguanosine-3'-phosphate
  modified_base 20: mod_base = OTHER; note = 2'-O-methyladenosine-3'-phosphate
  modified_base 21: mod_base = OTHER; note = 2'-O-methyladenosine-3'-phosphate attached to N-[tris(N-acetylgalactosamine-alkyl)-amidodecanoyl)]-4-hydr oxyprolinol (Hyp-(GalNAc-alkyl)3)
caaagcatgggattattagaa

SEQ ID NO: 278 - RNA, 21 nt, synthetic construct
  misc_feature 1..21: note = Description of Artificial Sequence: Synthetic oligonucleotide
  source 1..21: mol_type = other RNA
  modified_base 1: mod_base = OTHER; note = 2'-O-methylcytidine-3'-phosphorothioate
  modified_base 2: mod_base = OTHER; note = 2'-O-methyluridine-3'-phosphorothioate
  modified_base 3: mod_base = OTHER; note = 2'-O-methylguanosine-3'-phosphate
  modified_base 4: mod_base = OTHER; note = 2'-O-methyluridine-3'-phosphate
  modified_base 5: mod_base = OTHER; note = 2'-O-methylcytidine-3'-phosphate
  modified_base 6: mod_base = OTHER; note = 2'-O-methylcytidine-3'-phosphate
  modified_base 7: mod_base = OTHER; note = 2'-fluorouridine-3'-phosphate
  modified_base 8: mod_base = OTHER; note = 2'-O-methyluridine-3'-phosphate
  modified_base 9: mod_base = OTHER; note = 2'-fluoroguanosine-3'-phosphate
  modified_base 10: mod_base = OTHER; note = 2'-fluoroadenosine-3'-phosphate
  modified_base 11: mod_base = OTHER; note = 2'-fluoroadenosine-3'-phosphate
  modified_base 12: mod_base = OTHER; note = 2'-O-methylguanosine-3'-phosphate
  modified_base 13: mod_base = OTHER; note = 2'-O-methylguanosine-3'-phosphate
  modified_base 14: mod_base = OTHER; note = 2'-O-methyladenosine-3'-phosphate
  modified_base 15: mod_base = OTHER; note = 2'-O-methylcytidine-3'-phosphate
  modified_base 16: mod_base = OTHER; note = 2'-O-methyluridine-3'-phosphate
  modified_base 17: mod_base = OTHER; note = 2'-O-methyladenosine-3'-phosphate
  modified_base 18: mod_base = OTHER; note = 2'-O-methyladenosine-3'-phosphate
  modified_base 19: mod_base = OTHER; note = 2'-O-methyluridine-3'-phosphate
  modified_base 20: mod_base = OTHER; note = 2'-O-methyladenosine-3'-phosphate
  modified_base 21: mod_base = OTHER; note = 2'-O-methyladenosine-3'-phosphate attached to N-[tris(N-acetylgalactosamine-alkyl)-amidodecanoyl)]-4-hydr oxyprolinol (Hyp-(GalNAc-alkyl)3)
ctgtccttgaaggactaataa

SEQ ID NO: 279 - RNA, 21 nt, synthetic construct
  misc_feature 1..21: note = Description of Artificial Sequence: Synthetic oligonucleotide
  source 1..21: mol_type = other RNA
  modified_base 1: mod_base = OTHER; note = 2'-O-methyluridine-3'-phosphorothioate
  modified_base 2: mod_base = OTHER; note = 2'-O-methyladenosine-3'-phosphorothioate
  modified_base 3: mod_base = OTHER; note = 2'-O-methylcytidine-3'-phosphate
  modified_base 4: mod_base = OTHER; note = 2'-O-methylcytidine-3'-phosphate
  modified_base 5: mod_base = OTHER; note = 2'-O-methyladenosine-3'-phosphate
  modified_base 6: mod_base = OTHER; note = 2'-O-methyluridine-3'-phosphate
  modified_base 7: mod_base = OTHER; note = 2'-fluoroguanosine-3'-phosphate
  modified_base 8: mod_base = OTHER; note = 2'-O-methyluridine-3'-phosphate
  modified_base 9: mod_base = OTHER; note = 2'-fluoroadenosine-3'-phosphate
  modified_base 10: mod_base = OTHER; note = 2'-fluoroadenosine-3'-phosphate
  modified_base 11: mod_base = OTHER; note = 2'-fluorouridine-3'-phosphate
  modified_base 12: mod_base = OTHER; note = 2'-O-methylguanosine-3'-phosphate
  modified_base 13: mod_base = OTHER; note = 2'-O-methylguanosine-3'-phosphate
  modified_base 14: mod_base = OTHER; note = 2'-O-methylcytidine-3'-phosphate
  modified_base 15: mod_base = OTHER; note = 2'-O-methyladenosine-3'-phosphate
  modified_base 16: mod_base = OTHER; note = 2'-O-methylguanosine-3'-phosphate
  modified_base 17: mod_base = OTHER; note = 2'-O-methyluridine-3'-phosphate
  modified_base 18: mod_base = OTHER; note = 2'-O-methyluridine-3'-phosphate
  modified_base 19: mod_base = OTHER; note = 2'-O-methyladenosine-3'-phosphate
  modified_base 20: mod_base = OTHER; note = 2'-O-methyluridine-3'-phosphate
  modified_base 21: mod_base = OTHER; note = 2'-O-methyladenosine-3'-phosphate attached to N-[tris(N-acetylgalactosamine-alkyl)-amidodecanoyl)]-4-hydr oxyprolinol (Hyp-(GalNAc-alkyl)3)
taccatgtaatggcagttata

SEQ ID NO: 280 - RNA, 21 nt, synthetic construct
  misc_feature 1..21: note = Description of Artificial Sequence: Synthetic oligonucleotide
  source 1..21: mol_type = other RNA
  modified_base 1: mod_base = OTHER; note = 2'-O-methyluridine-3'-phosphorothioate
  modified_base 2: mod_base = OTHER; note = 2'-O-methyladenosine-3'-phosphorothioate
  modified_base 3: mod_base = OTHER; note = 2'-O-methyladenosine-3'-phosphate
  modified_base 4: mod_base = OTHER; note = 2'-O-methyladenosine-3'-phosphate
  modified_base 5: mod_base = OTHER; note = 2'-O-methyluridine-3'-phosphate
  modified_base 6: mod_base = OTHER; note = 2'-O-methyladenosine-3'-phosphate
  modified_base 7: mod_base = OTHER; note = 2'-fluorouridine-3'-phosphate
  modified_base 8: mod_base = OTHER; note = 2'-O-methylguanosine-3'-phosphate
  modified_base 9: mod_base = OTHER; note = 2'-fluoroguanosine-3'-phosphate
  modified_base 10: mod_base = OTHER; note = 2'-fluoroadenosine-3'-phosphate
  modified_base 11: mod_base = OTHER; note = 2'-fluorocytidine-3'-phosphate
  modified_base 12: mod_base = OTHER; note = 2'-O-methyluridine-3'-phosphate
  modified_base 13: mod_base = OTHER; note = 2'-O-methylguanosine-3'-phosphate
  modified_base 14: mod_base = OTHER; note = 2'-O-methylcytidine-3'-phosphate
  modified_base 15: mod_base = OTHER; note = 2'-O-methyluridine-3'-phosphate
  modified_base 16: mod_base = OTHER; note = 2'-O-methylcytidine-3'-phosphate
  modified_base 17: mod_base = OTHER; note = 2'-O-methyladenosine-3'-phosphate
  modified_base 18: mod_base = OTHER; note = 2'-O-methylguanosine-3'-phosphate
  modified_base 19: mod_base = OTHER; note = 2'-O-methylguanosine-3'-phosphate
  modified_base 20: mod_base = OTHER; note = 2'-O-methyladenosine-3'-phosphate
  modified_base 21: mod_base = OTHER; note = 2'-O-methyladenosine-3'-phosphate attached to N-[tris(N-acetylgalactosamine-alkyl)-amidodecanoyl)]-4-hydr oxyprolinol (Hyp-(GalNAc-alkyl)3)
taaatatggactgctcaggaa

SEQ ID NO: 281 - RNA, 21 nt, synthetic construct
  misc_feature 1..21: note = Description of Artificial Sequence: Synthetic oligonucleotide
  source 1..21: mol_type = other RNA
  modified_base 1: mod_base = OTHER; note = 2'-O-methylguanosine-3'-phosphorothioate
  modified_base 2: mod_base = OTHER; note = 2'-O-methyluridine-3'-phosphorothioate
  modified_base 3: mod_base = OTHER; note = 2'-O-methyladenosine-3'-phosphate
  modified_base 4: mod_base = OTHER; note = 2'-O-methyluridine-3'-phosphate
  modified_base 5: mod_base = OTHER; note = 2'-O-methyladenosine-3'-phosphate
  modified_base 6: mod_base = OTHER; note = 2'-O-methylguanosine-3'-phosphate
  modified_base 7: mod_base = OTHER; note = 2'-fluorouridine-3'-phosphate
  modified_base 8: mod_base = OTHER; note = 2'-O-methyluridine-3'-phosphate
  modified_base 9: mod_base = OTHER; note = 2'-fluoroadenosine-3'-phosphate
  modified_base 10: mod_base = OTHER; note = 2'-fluoroadenosine-3'-phosphate
  modified_base 11: mod_base = OTHER; note = 2'-fluorocytidine-3'-phosphate
  modified_base 12: mod_base = OTHER; note = 2'-O-methyladenosine-3'-phosphate
  modified_base 13: mod_base = OTHER; note = 2'-O-methylcytidine-3'-phosphate
  modified_base 14: mod_base = OTHER; note = 2'-O-methyladenosine-3'-phosphate
  modified_base 15: mod_base = OTHER; note = 2'-O-methylcytidine-3'-phosphate
  modified_base 16: mod_base = OTHER; note = 2'-O-methyluridine-3'-phosphate
  modified_base 17: mod_base = OTHER; note = 2'-O-methyladenosine-3'-phosphate
  modified_base 18: mod_base = OTHER; note = 2'-O-methylcytidine-3'-phosphate
  modified_base 19: mod_base = OTHER; note = 2'-O-methylcytidine-3'-phosphate
  modified_base 20: mod_base = OTHER; note = 2'-O-methylguanosine-3'-phosphate
  modified_base 21: mod_base = OTHER; note = 2'-O-methyladenosine-3'-phosphate attached to N-[tris(N-acetylgalactosamine-alkyl)-amidodecanoyl)]-4-hydr oxyprolinol (Hyp-(GalNAc-alkyl)3)
gtatagttaacacactaccga

SEQ ID NO: 282 - RNA, 21 nt, synthetic construct
  misc_feature 1..21: note = Description of Artificial Sequence: Synthetic oligonucleotide
  source 1..21: mol_type = other RNA
  modified_base 1: mod_base = OTHER; note = 2'-O-methyluridine-3'-phosphorothioate
  modified_base 2: mod_base = OTHER; note = 2'-O-methyluridine-3'-phosphorothioate
  modified_base 3: mod_base = OTHER; note = 2'-O-methyluridine-3'-phosphate
  modified_base 4: mod_base = OTHER; note = 2'-O-methyladenosine-3'-phosphate
  modified_base 5: mod_base = OTHER; note = 2'-O-methylcytidine-3'-phosphate
  modified_base 6: mod_base = OTHER; note = 2'-O-methyladenosine-3'-phosphate
  modified_base 7: mod_base = OTHER; note = 2'-fluorouridine-3'-phosphate
  modified_base 8: mod_base = OTHER; note = 2'-O-methylguanosine-3'-phosphate
  modified_base 9: mod_base = OTHER; note = 2'-fluoroadenosine-3'-phosphate
  modified_base 10: mod_base = OTHER; note = 2'-fluoroguanosine-3'-phosphate
  modified_base 11: mod_base = OTHER; note = 2'-fluoroguanosine-3'-phosphate
  modified_base 12: mod_base = OTHER; note = 2'-O-methyladenosine-3'-phosphate
  modified_base 13: mod_base = OTHER; note = 2'-O-methylcytidine-3'-phosphate
  modified_base 14: mod_base = OTHER; note = 2'-O-methyluridine-3'-phosphate
  modified_base 15: mod_base = OTHER; note = 2'-O-methylcytidine-3'-phosphate
  modified_base 16: mod_base = OTHER; note = 2'-O-methyluridine-3'-phosphate
  modified_base 17: mod_base = OTHER; note = 2'-O-methyladenosine-3'-phosphate
  modified_base 18: mod_base = OTHER; note = 2'-O-methyluridine-3'-phosphate
  modified_base 19: mod_base = OTHER; note = 2'-O-methyluridine-3'-phosphate
  modified_base 20: mod_base = OTHER; note = 2'-O-methylcytidine-3'-phosphate
  modified_base 21: mod_base = OTHER; note = 2'-O-methyluridine-3'-phosphate attached to N-[tris(N-acetylgalactosamine-alkyl)-amidodecanoyl)]-4-hydr oxyprolinol (Hyp-(GalNAc-alkyl)3)
tttacatgaggactctattct

SEQ ID NO: 283 - RNA, 21 nt, synthetic construct
  misc_feature 1..21: note = Description of Artificial Sequence: Synthetic oligonucleotide
  source 1..21: mol_type = other RNA
  modified_base 1: mod_base = OTHER; note = 2'-O-methyladenosine-3'-phosphorothioate
  modified_base 2: mod_base = OTHER; note = 2'-O-methylcytidine-3'-phosphorothioate
  modified_base 3: mod_base = OTHER; note = 2'-O-methyluridine-3'-phosphate
  modified_base 4: mod_base = OTHER; note = 2'-O-methylcytidine-3'-phosphate
  modified_base 5: mod_base = OTHER; note = 2'-O-methylcytidine-3'-phosphate
  modified_base 6: mod_base = OTHER; note = 2'-O-methylcytidine-3'-phosphate
  modified_base 7: mod_base = OTHER; note = 2'-fluoroadenosine-3'-phosphate
  modified_base 8: mod_base = OTHER; note = 2'-O-methyluridine-3'-phosphate
  modified_base 9: mod_base = OTHER; note = 2'-fluorouridine-3'-phosphate
  modified_base 10: mod_base = OTHER; note = 2'-fluoroadenosine-3'-phosphate
  modified_base 11: mod_base = OTHER; note = 2'-fluorocytidine-3'-phosphate
  modified_base 12: mod_base = OTHER; note = 2'-O-methylcytidine-3'-phosphate
  modified_base 13: mod_base = OTHER; note = 2'-O-methyladenosine-3'-phosphate
  modified_base 14: mod_base = OTHER; note = 2'-O-methyluridine-3'-phosphate
  modified_base 15: mod_base = OTHER; note = 2'-O-methylguanosine-3'-phosphate
  modified_base 16: mod_base = OTHER; note = 2'-O-methyluridine-3'-phosphate
  modified_base 17: mod_base = OTHER; note = 2'-O-methyladenosine-3'-phosphate
  modified_base 18: mod_base = OTHER; note = 2'-O-methyladenosine-3'-phosphate
  modified_base 19: mod_base = OTHER; note = 2'-O-methyluridine-3'-phosphate
  modified_base 20: mod_base = OTHER; note = 2'-O-methylguanosine-3'-phosphate
  modified_base 21: mod_base = OTHER; note = 2'-O-methyladenosine-3'-phosphate attached to N-[tris(N-acetylgalactosamine-alkyl)-amidodecanoyl)]-4-hydr oxyprolinol (Hyp-(GalNAc-alkyl)3)
actcccattaccatgtaatga

SEQ ID NO: 284 - RNA, 21 nt, synthetic construct
  misc_feature 1..21: note = Description of Artificial Sequence: Synthetic oligonucleotide
  source 1..21: mol_type = other RNA
  modified_base 1: mod_base = OTHER; note = 2'-O-methyladenosine-3'-phosphorothioate
  modified_base 2: mod_base = OTHER; note = 2'-O-methyladenosine-3'-phosphorothioate
  modified_base 3: mod_base = OTHER; note = 2'-O-methyladenosine-3'-phosphate
  modified_base 4: mod_base = OTHER; note = 2'-O-methyladenosine-3'-phosphate
  modified_base 5: mod_base = OTHER; note = 2'-O-methyladenosine-3'-phosphate
  modified_base 6: mod_base = OTHER; note = 2'-O-methylguanosine-3'-phosphate
  modified_base 7: mod_base = OTHER; note = 2'-fluorocytidine-3'-phosphate
  modified_base 8: mod_base = OTHER; note = 2'-O-methyluridine-3'-phosphate
  modified_base 9: mod_base = OTHER; note = 2'-fluorouridine-3'-phosphate
  modified_base 10: mod_base = OTHER; note = 2'-fluorouridine-3'-phosphate
  modified_base 11: mod_base = OTHER; note = 2'-fluorouridine-3'-phosphate
  modified_base 12: mod_base = OTHER; note = 2'-O-methylguanosine-3'-phosphate
  modified_base 13: mod_base = OTHER; note = 2'-O-methyluridine-3'-phosphate
  modified_base 14: mod_base = OTHER; note = 2'-O-methylcytidine-3'-phosphate
  modified_base 15: mod_base = OTHER; note = 2'-O-methyluridine-3'-phosphate
  modified_base 16: mod_base = OTHER; note = 2'-O-methyladenosine-3'-phosphate
  modified_base 17: mod_base = OTHER; note = 2'-O-methylcytidine-3'-phosphate
  modified_base 18: mod_base = OTHER; note = 2'-O-methyladenosine-3'-phosphate
  modified_base 19: mod_base = OTHER; note = 2'-O-methylcytidine-3'-phosphate
  modified_base 20: mod_base = OTHER; note = 2'-O-methyladenosine-3'-phosphate
  modified_base 21: mod_base = OTHER; note = 2'-O-methyladenosine-3'-phosphate attached to N-[tris(N-acetylgalactosamine-alkyl)-amidodecanoyl)]-4-hydr oxyprolinol (Hyp-(GalNAc-alkyl)3)
aaaaagcttttgtctacacaa

SEQ ID NO: 285 - RNA, 21 nt, synthetic construct
  misc_feature 1..21: note = Description of Artificial Sequence: Synthetic oligonucleotide
  source 1..21: mol_type = other RNA
  modified_base 1: mod_base = OTHER; note = 2'-O-methyladenosine-3'-phosphorothioate
  modified_base 2: mod_base = OTHER; note = 2'-O-methyluridine-3'-phosphorothioate
  modified_base 3: mod_base = OTHER; note = 2'-O-methyladenosine-3'-phosphate
  modified_base 4: mod_base = OTHER; note = 2'-O-methylguanosine-3'-phosphate
  modified_base 5: mod_base = OTHER; note = 2'-O-methyluridine-3'-phosphate
  modified_base 6: mod_base = OTHER; note = 2'-O-methyluridine-3'-phosphate
  modified_base 7: mod_base = OTHER; note = 2'-fluorouridine-3'-phosphate
  modified_base 8: mod_base = OTHER; note = 2'-O-methyluridine-3'-phosphate
  modified_base 9: mod_base = OTHER; note = 2'-fluorocytidine-3'-phosphate
  modified_base 10: mod_base = OTHER; note = 2'-fluoroadenosine-3'-phosphate
  modified_base 11: mod_base = OTHER; note = 2'-fluorouridine-3'-phosphate
  modified_base 12: mod_base = OTHER; note = 2'-O-methylcytidine-3'-phosphate
  modified_base 13: mod_base = OTHER; note = 2'-O-methylcytidine-3'-phosphate
  modified_base 14: mod_base = OTHER; note = 2'-O-methyladenosine-3'-phosphate
  modified_base 15: mod_base = OTHER; note = 2'-O-methyluridine-3'-phosphate
  modified_base 16: mod_base = OTHER; note = 2'-O-methyladenosine-3'-phosphate
  modified_base 17: mod_base = OTHER; note = 2'-O-methyladenosine-3'-phosphate
  modified_base 18: mod_base = OTHER; note = 2'-O-methylcytidine-3'-phosphate
  modified_base 19: mod_base = OTHER; note = 2'-O-methyluridine-3'-phosphate
  modified_base 20: mod_base = OTHER; note = 2'-O-methylguanosine-3'-phosphate
  modified_base 21: mod_base = OTHER; note = 2'-O-methyladenosine-3'-phosphate attached to N-[tris(N-acetylgalactosamine-alkyl)-amidodecanoyl)]-4-hydr oxyprolinol (Hyp-(GalNAc-alkyl)3)
atagttttcatccataactga

SEQ ID NO: 286 - RNA, 21 nt, synthetic construct
  misc_feature 1..21: note = Description of Artificial Sequence: Synthetic oligonucleotide
  source 1..21: mol_type = other RNA
  modified_base 1: mod_base = OTHER; note = 2'-O-methyluridine-3'-phosphorothioate
  modified_base 2: mod_base = OTHER; note = 2'-O-methylguanosine-3'-phosphorothioate
  modified_base 3: mod_base = OTHER; note = 2'-O-methylguanosine-3'-phosphate
  modified_base 4: mod_base = OTHER; note = 2'-O-methylguanosine-3'-phosphate
  modified_base 5: mod_base = OTHER; note = 2'-O-methyladenosine-3'-phosphate
  modified_base 6: mod_base = OTHER; note = 2'-O-methyluridine-3'-phosphate
  modified_base 7: mod_base = OTHER; note = 2'-fluorouridine-3'-phosphate
  modified_base 8: mod_base = OTHER; note = 2'-O-methyladenosine-3'-phosphate
  modified_base 9: mod_base = OTHER; note = 2'-fluorouridine-3'-phosphate
  modified_base 10: mod_base = OTHER; note = 2'-fluorouridine-3'-phosphate
  modified_base 11: mod_base = OTHER; note = 2'-fluoroadenosine-3'-phosphate
  modified_base 12: mod_base = OTHER; note = 2'-O-methylguanosine-3'-phosphate
  modified_base 13: mod_base = OTHER; note = 2'-O-methyladenosine-3'-phosphate
  modified_base 14: mod_base = OTHER; note = 2'-O-methyladenosine-3'-phosphate
  modified_base 15: mod_base = OTHER; note = 2'-O-methyluridine-3'-phosphate
  modified_base 16: mod_base = OTHER; note = 2'-O-methylcytidine-3'-phosphate
  modified_base 17: mod_base = OTHER; note = 2'-O-methyladenosine-3'-phosphate
  modified_base 18: mod_base = OTHER; note = 2'-O-methyladenosine-3'-phosphate
  modified_base 19: mod_base = OTHER; note = 2'-O-methyladenosine-3'-phosphate
  modified_base 20: mod_base = OTHER; note = 2'-O-methylcytidine-3'-phosphate
  modified_base 21: mod_base = OTHER; note = 2'-O-methyladenosine-3'-phosphate attached to N-[tris(N-acetylgalactosamine-alkyl)-amidodecanoyl)]-4-hydr oxyprolinol (Hyp-(GalNAc-alkyl)3)
tgggattattagaatcaaaca

SEQ ID NO: 287 - RNA, 21 nt, synthetic construct
  misc_feature 1..21: note = Description of Artificial Sequence: Synthetic oligonucleotide
  source 1..21: mol_type = other RNA
  modified_base 1: mod_base = OTHER; note = 2'-O-methylguanosine-3'-phosphorothioate
  modified_base 2: mod_base = OTHER; note = 2'-O-methylguanosine-3'-phosphorothioate
  modified_base 3: mod_base = OTHER; note = 2'-O-methylguanosine-3'-phosphate
  modified_base 4: mod_base = OTHER; note = 2'-O-methyladenosine-3'-phosphate
  modified_base 5: mod_base = OTHER; note = 2'-O-methyladenosine-3'-phosphate
  modified_base 6: mod_base = OTHER; note = 2'-O-methylguanosine-3'-phosphate
  modified_base 7: mod_base = OTHER; note = 2'-fluorocytidine-3'-phosphate
  modified_base 8: mod_base = OTHER; note = 2'-O-methyluridine-3'-phosphate
  modified_base 9: mod_base = OTHER; note = 2'-fluoroadenosine-3'-phosphate
  modified_base 10: mod_base = OTHER; note = 2'-fluoroguanosine-3'-phosphate
  modified_base 11: mod_base = OTHER; note = 2'-fluorouridine-3'-phosphate
  modified_base 12: mod_base = OTHER; note = 2'-O-methylcytidine-3'-phosphate
  modified_base 13: mod_base = OTHER; note = 2'-O-methyluridine-3'-phosphate
  modified_base 14: mod_base = OTHER; note = 2'-O-methyluridine-3'-phosphate
  modified_base 15: mod_base = OTHER; note = 2'-O-methyluridine-3'-phosphate
  modified_base 16: mod_base = OTHER; note = 2'-O-methyluridine-3'-phosphate
  modified_base 17: mod_base = OTHER; note = 2'-O-methylguanosine-3'-phosphate
  modified_base 18: mod_base = OTHER; note = 2'-O-methylcytidine-3'-phosphate
  modified_base 19: mod_base = OTHER; note = 2'-O-methyluridine-3'-phosphate
  modified_base 20: mod_base = OTHER; note = 2'-O-methyluridine-3'-phosphate
  modified_base 21: mod_base = OTHER; note = 2'-O-methyluridine-3'-phosphate attached to N-[tris(N-acetylgalactosamine-alkyl)-amidodecanoyl)]-4-hydr oxyprolinol (Hyp-(GalNAc-alkyl)3)
gggaagctagtcttttgcttt

SEQ ID NO: 288 - RNA, 21 nt, synthetic construct
  misc_feature 1..21: note = Description of Artificial Sequence: Synthetic oligonucleotide
  source 1..21: mol_type = other RNA
  modified_base 1: mod_base = OTHER; note = 2'-O-methyladenosine-3'-phosphorothioate
  modified_base 2: mod_base = OTHER; note = 2'-O-methyladenosine-3'-phosphorothioate
  modified_base 3: mod_base = OTHER; note = 2'-O-methylguanosine-3'-phosphate
  modified_base 4: mod_base = OTHER; note = 2'-O-methyluridine-3'-phosphate
  modified_base 5: mod_base = OTHER; note = 2'-O-methyluridine-3'-phosphate
  modified_base 6: mod_base = OTHER; note = 2'-O-methylguanosine-3'-phosphate
  modified_base 7: mod_base = OTHER; note = 2'-fluoroadenosine-3'-phosphate
  modified_base 8: mod_base = OTHER; note = 2'-O-methylguanosine-3'-phosphate
  modified_base 9: mod_base = OTHER; note = 2'-fluoroadenosine-3'-phosphate
  modified_base 10: mod_base = OTHER; note = 2'-fluorouridine-3'-phosphate
  modified_base 11: mod_base = OTHER; note = 2'-fluoroadenosine-3'-phosphate
  modified_base 12: mod_base = OTHER; note = 2'-O-methylguanosine-3'-phosphate
  modified_base 13: mod_base = OTHER; note = 2'-O-methyluridine-3'-phosphate
  modified_base 14: mod_base = OTHER; note = 2'-O-methyluridine-3'-phosphate
  modified_base 15: mod_base = OTHER; note = 2'-O-methyluridine-3'-phosphate
  modified_base 16: mod_base = OTHER; note = 2'-O-methyluridine-3'-phosphate
  modified_base 17: mod_base = OTHER; note = 2'-O-methylcytidine-3'-phosphate
  modified_base 18: mod_base = OTHER; note = 2'-O-methyladenosine-3'-phosphate
  modified_base 19: mod_base = OTHER; note = 2'-O-methyluridine-3'-phosphate
  modified_base 20: mod_base = OTHER; note = 2'-O-methylcytidine-3'-phosphate
  modified_base 21: mod_base = OTHER; note = 2'-O-methyladenosine-3'-phosphate attached to N-[tris(N-acetylgalactosamine-alkyl)-amidodecanoyl)]-4-hydr oxyprolinol (Hyp-(GalNAc-alkyl)3)
aagttgagatagttttcatca

SEQ ID NO: 289 - RNA, 21 nt, synthetic construct
  misc_feature 1..21: note = Description of Artificial Sequence: Synthetic oligonucleotide
  source 1..21: mol_type = other RNA
  modified_base 1: mod_base = OTHER; note = 2'-O-methyluridine-3'-phosphorothioate
  modified_base 2: mod_base = OTHER; note = 2'-O-methyladenosine-3'-phosphorothioate
  modified_base 3: mod_base = OTHER; note = 2'-O-methyladenosine-3'-phosphate
  modified_base 4: mod_base = OTHER; note = 2'-O-methylguanosine-3'-phosphate
  modified_base 5: mod_base = OTHER; note = 2'-O-methyladenosine-3'-phosphate
  modified_base 6: mod_base = OTHER; note = 2'-O-methyladenosine-3'-phosphate
  modified_base 7: mod_base = OTHER; note = 2'-fluoroadenosine-3'-phosphate
  modified_base 8: mod_base = OTHER; note = 2'-O-methyluridine-3'-phosphate
  modified_base 9: mod_base = OTHER; note = 2'-fluorouridine-3'-phosphate
  modified_base 10: mod_base = OTHER; note = 2'-fluorouridine-3'-phosphate
  modified_base 11: mod_base = OTHER; note = 2'-fluorocytidine-3'-phosphate
  modified_base 12: mod_base = OTHER; note = 2'-O-methyladenosine-3'-phosphate
  modified_base 13: mod_base = OTHER; note = 2'-O-methylcytidine-3'-phosphate
  modified_base 14: mod_base = OTHER; note = 2'-O-methyladenosine-3'-phosphate
  modified_base 15: mod_base = OTHER; note = 2'-O-methyluridine-3'-phosphate
  modified_base 16: mod_base = OTHER; note = 2'-O-methyladenosine-3'-phosphate
  modified_base 17: mod_base = OTHER; note = 2'-O-methylguanosine-3'-phosphate
  modified_base 18: mod_base = OTHER; note = 2'-O-methylcytidine-3'-phosphate
  modified_base 19: mod_base = OTHER; note = 2'-O-methylcytidine-3'-phosphate
  modified_base 20: mod_base = OTHER; note = 2'-O-methylcytidine-3'-phosphate
  modified_base 21: mod_base = OTHER; note = 2'-O-methyladenosine-3'-phosphate attached to N-[tris(N-acetylgalactosamine-alkyl)-amidodecanoyl)]-4-hydr oxyprolinol (Hyp-(GalNAc-alkyl)3)
taagaaatttcacatagccca

SEQ ID NO: 290 - RNA, 21 nt, synthetic construct
  misc_feature 1..21: note = Description of Artificial Sequence: Synthetic oligonucleotide
  source 1..21: mol_type = other RNA
  modified_base 1: mod_base = OTHER; note = 2'-O-methyluridine-3'-phosphorothioate
  modified_base 2: mod_base = OTHER; note = 2'-O-methyluridine-3'-phosphorothioate
  modified_base 3: mod_base = OTHER; note = 2'-O-methyluridine-3'-phosphate
  modified_base 4: mod_base = OTHER; note = 2'-O-methyladenosine-3'-phosphate
  modified_base 5: mod_base = OTHER; note = 2'-O-methyladenosine-3'-phosphate
  modified_base 6: mod_base = OTHER; note = 2'-O-methyluridine-3'-phosphate
  modified_base 7: mod_base = OTHER; note = 2'-fluorouridine-3'-phosphate
  modified_base 8: mod_base = OTHER; note = 2'-O-methyladenosine-3'-phosphate
  modified_base 9: mod_base = OTHER; note = 2'-fluoroadenosine-3'-phosphate
  modified_base 10: mod_base = OTHER; note = 2'-fluorouridine-3'-phosphate
  modified_base 11: mod_base = OTHER; note = 2'-fluorouridine-3'-phosphate
  modified_base 12: mod_base = OTHER; note = 2'-O-methylguanosine-3'-phosphate
  modified_base 13: mod_base = OTHER; note = 2'-O-methylguanosine-3'-phosphate
  modified_base 14: mod_base = OTHER; note = 2'-O-methylguanosine-3'-phosphate
  modified_base 15: mod_base = OTHER; note = 2'-O-methylcytidine-3'-phosphate
  modified_base 16: mod_base = OTHER; note = 2'-O-methylcytidine-3'-phosphate
  modified_base 17: mod_base = OTHER; note = 2'-O-methyladenosine-3'-phosphate
  modified_base 18: mod_base = OTHER; note = 2'-O-methylguanosine-3'-phosphate
  modified_base 19: mod_base = OTHER; note = 2'-O-methylcytidine-3'-phosphate
  modified_base 20: mod_base = OTHER; note = 2'-O-methyluridine-3'-phosphate
  modified_base 21: mod_base = OTHER; note = 2'-O-methyluridine-3'-phosphate attached to N-[tris(N-acetylgalactosamine-alkyl)-amidodecanoyl)]-4-hydr oxyprolinol (Hyp-(GalNAc-alkyl)3)
tttaattaattgggccagctt

SEQ ID NO: 291 - RNA, 21 nt, synthetic construct
  misc_feature 1..21: note = Description of Artificial Sequence: Synthetic oligonucleotide
  source 1..21: mol_type = other RNA
  modified_base 1: mod_base = OTHER; note = 2'-O-methyluridine-3'-phosphorothioate
  modified_base 2: mod_base = OTHER; note = 2'-O-methyluridine-3'-phosphorothioate
  modified_base 3: mod_base = OTHER; note = 2'-O-methyluridine-3'-phosphate
  modified_base 4: mod_base = OTHER; note = 2'-O-methyluridine-3'-phosphate
  modified_base 5: mod_base = OTHER; note = 2'-O-methylcytidine-3'-phosphate
  modified_base 6: mod_base = OTHER; note = 2'-O-methylguanosine-3'-phosphate
  modified_base 7: mod_base = OTHER; note = 2'-fluoroadenosine-3'-phosphate
  modified_base 8: mod_base = OTHER; note = 2'-O-methylguanosine-3'-phosphate
  modified_base 9: mod_base = OTHER; note = 2'-fluoroadenosine-3'-phosphate
  modified_base 10: mod_base = OTHER; note = 2'-fluorouridine-3'-phosphate
  modified_base 11: mod_base = OTHER; note = 2'-fluorouridine-3'-phosphate
  modified_base 12: mod_base = OTHER; note = 2'-O-methyladenosine-3'-phosphate
  modified_base 13: mod_base = OTHER; note = 2'-O-methyluridine-3'-phosphate
  modified_base 14: mod_base = OTHER; note = 2'-O-methylcytidine-3'-phosphate
  modified_base 15: mod_base = OTHER; note = 2'-O-methylguanosine-3'-phosphate
  modified_base 16: mod_base = OTHER; note = 2'-O-methyluridine-3'-phosphate
  modified_base 17: mod_base = OTHER; note = 2'-O-methyluridine-3'-phosphate
  modified_base 18: mod_base = OTHER; note = 2'-O-methyluridine-3'-phosphate
  modified_base 19: mod_base = OTHER; note = 2'-O-methyluridine-3'-phosphate
  modified_base 20: mod_base = OTHER; note = 2'-O-methylcytidine-3'-phosphate
  modified_base 21: mod_base = OTHER; note = 2'-O-methyluridine-3'-phosphate attached to N-[tris(N-acetylgalactosamine-alkyl)-amidodecanoyl)]-4-hydr oxyprolinol (Hyp-(GalNAc-alkyl)3)
ttttcgagattatcgttttct

SEQ ID NO: 292 - RNA, 21 nt, synthetic construct
  misc_feature 1..21: note = Description of Artificial Sequence: Synthetic oligonucleotide
  source 1..21: mol_type = other RNA
  modified_base 1: mod_base = OTHER; note = 2'-O-methyladenosine-3'-phosphorothioate
  modified_base 2: mod_base = OTHER; note = 2'-O-methyladenosine-3'-phosphorothioate
  modified_base 3: mod_base = OTHER; note = 2'-O-methyluridine-3'-phosphate
  modified_base 4: mod_base = OTHER; note = 2'-O-methylcytidine-3'-phosphate
  modified_base 5: mod_base = OTHER; note = 2'-O-methyluridine-3'-phosphate
  modified_base 6: mod_base = OTHER; note = 2'-O-methyladenosine-3'-phosphate
  modified_base 7: mod_base = OTHER; note = 2'-fluorocytidine-3'-phosphate
  modified_base 8: mod_base = OTHER; note = 2'-O-methyluridine-3'-phosphate
  modified_base 9: mod_base = OTHER; note = 2'-fluorocytidine-3'-phosphate
  modified_base 10: mod_base = OTHER; note = 2'-fluoroadenosine-3'-phosphate
  modified_base 11: mod_base = OTHER; note = 2'-fluoroadenosine-3'-phosphate
  modified_base 12: mod_base = OTHER; note = 2'-O-methyladenosine-3'-phosphate
  modified_base 13: mod_base = OTHER; note = 2'-O-methylguanosine-3'-phosphate
  modified_base 14: mod_base = OTHER; note = 2'-O-methylcytidine-3'-phosphate
  modified_base 15: mod_base = OTHER; note = 2'-O-methyladenosine-3'-phosphate
  modified_base 16: mod_base = OTHER; note = 2'-O-methyluridine-3'-phosphate
  modified_base 17: mod_base = OTHER; note = 2'-O-methylguanosine-3'-phosphate
  modified_base 18: mod_base = OTHER; note = 2'-O-methylguanosine-3'-phosphate
  modified_base 19: mod_base = OTHER; note = 2'-O-methylguanosine-3'-phosphate
  modified_base 20: mod_base = OTHER; note = 2'-O-methyladenosine-3'-phosphate
  modified_base 21: mod_base = OTHER; note = 2'-O-methyluridine-3'-phosphate attached to N-[tris(N-acetylgalactosamine-alkyl)-amidodecanoyl)]-4-hydr oxyprolinol (Hyp-(GalNAc-alkyl)3)
aatctactcaaagcatgggat

SEQ ID NO: 293 - RNA, 21 nt, synthetic construct
  misc_feature 1..21: note = Description of Artificial Sequence: Synthetic oligonucleotide
  source 1..21: mol_type = other RNA
  modified_base 1: mod_base = OTHER; note = 2'-O-methyladenosine-3'-phosphorothioate
  modified_base 2: mod_base = OTHER; note = 2'-O-methyluridine-3'-phosphorothioate
  modified_base 3: mod_base = OTHER; note = 2'-O-methylguanosine-3'-phosphate
  modified_base 4: mod_base = OTHER; note = 2'-O-methylguanosine-3'-phosphate
  modified_base 5: mod_base = OTHER; note = 2'-O-methyladenosine-3'-phosphate
  modified_base 6: mod_base = OTHER; note = 2'-O-methylcytidine-3'-phosphate
  modified_base 7: mod_base = OTHER; note = 2'-fluorouridine-3'-phosphate
  modified_base 8: mod_base = OTHER; note = 2'-O-methylguanosine-3'-phosphate
  modified_base 9: mod_base = OTHER; note = 2'-fluorocytidine-3'-phosphate
  modified_base 10: mod_base = OTHER; note = 2'-fluorouridine-3'-phosphate
  modified_base 11: mod_base = OTHER; note = 2'-fluorocytidine-3'-phosphate
  modified_base 12: mod_base = OTHER; note = 2'-O-methyladenosine-3'-phosphate
  modified_base 13: mod_base = OTHER; note = 2'-O-methylguanosine-3'-phosphate
  modified_base 14: mod_base = OTHER; note = 2'-O-methylguanosine-3'-phosphate
  modified_base 15: mod_base = OTHER; note = 2'-O-methyladenosine-3'-phosphate
  modified_base 16: mod_base = OTHER; note = 2'-O-methyladenosine-3'-phosphate
  modified_base 17: mod_base = OTHER; note = 2'-O-methyladenosine-3'-phosphate
  modified_base 18: mod_base = OTHER; note = 2'-O-methylcytidine-3'-phosphate
  modified_base 19: mod_base = OTHER; note = 2'-O-methylguanosine-3'-phosphate
  modified_base 20: mod_base = OTHER; note = 2'-O-methyladenosine-3'-phosphate
  modified_base 21: mod_base = OTHER; note = 2'-O-methyladenosine-3'-phosphate attached to N-[tris(N-acetylgalactosamine-alkyl)-amidodecanoyl)]-4-hydr oxyprolinol (Hyp-(GalNAc-alkyl)3)
atggactgctcaggaaacgaa

SEQ ID NO: 294 - RNA, 21 nt, synthetic construct
  misc_feature 1..21: note = Description of Artificial Sequence: Synthetic oligonucleotide
  source 1..21: mol_type = other RNA
  modified_base 1: mod_base = OTHER; note = 2'-O-methyladenosine-3'-phosphorothioate
  modified_base 2: mod_base = OTHER; note = 2'-O-methyluridine-3'-phosphorothioate
  modified_base 3: mod_base = OTHER; note = 2'-O-methylcytidine-3'-phosphate
  modified_base 4: mod_base = OTHER; note = 2'-O-methyluridine-3'-phosphate
  modified_base 5: mod_base = OTHER; note = 2'-O-methylguanosine-3'-phosphate
  modified_base 6: mod_base = OTHER; note = 2'-O-methyladenosine-3'-phosphate
  modified_base 7: mod_base = OTHER; note = 2'-fluoroguanosine-3'-phosphate
  modified_base 8: mod_base = OTHER; note = 2'-O-methyluridine-3'-phosphate
  modified_base 9: mod_base = OTHER; note = 2'-fluorocytidine-3'-phosphate
  modified_base 10: mod_base = OTHER; note = 2'-fluorocytidine-3'-phosphate
  modified_base 11: mod_base = OTHER; note = 2'-fluorouridine-3'-phosphate
  modified_base 12: mod_base = OTHER; note = 2'-O-methylguanosine-3'-phosphate
  modified_base 13: mod_base = OTHER; note = 2'-O-methylguanosine-3'-phosphate
  modified_base 14: mod_base = OTHER; note = 2'-O-methyladenosine-3'-phosphate
  modified_base 15: mod_base = OTHER; note = 2'-O-methyluridine-3'-phosphate
  modified_base 16: mod_base = OTHER; note = 2'-O-methylguanosine-3'-phosphate
  modified_base 17: mod_base = OTHER; note = 2'-O-methyladenosine-3'-phosphate
  modified_base 18: mod_base = OTHER; note = 2'-O-methyluridine-3'-phosphate
  modified_base 19: mod_base = OTHER; note = 2'-O-methyladenosine-3'-phosphate
  modified_base 20: mod_base = OTHER; note = 2'-O-methylcytidine-3'-phosphate
  modified_base 21: mod_base = OTHER; note = 2'-O-methyluridine-3'-phosphate attached to N-[tris(N-acetylgalactosamine-alkyl)-amidodecanoyl)]-4-hydr oxyprolinol (Hyp-(GalNAc-alkyl)3)
atctgagtcctggatgatact

SEQ ID NO: 295 - RNA, 21 nt, synthetic construct
  misc_feature 1..21: note = Description of Artificial Sequence: Synthetic oligonucleotide
  source 1..21: mol_type = other RNA
  modified_base 1: mod_base = OTHER; note = 2'-O-methyluridine-3'-phosphorothioate
  modified_base 2: mod_base = OTHER; note = 2'-O-methylcytidine-3'-phosphorothioate
  modified_base 3: mod_base = OTHER; note = 2'-O-methyluridine-3'-phosphate
  modified_base 4: mod_base = OTHER; note = 2'-O-methylcytidine-3'-phosphate
  modified_base 5: mod_base = OTHER; note = 2'-O-methyluridine-3'-phosphate
  modified_base 6: mod_base = OTHER; note = 2'-O-methylguanosine-3'-phosphate
  modified_base 7: mod_base = OTHER; note = 2'-fluoroadenosine-3'-phosphate
  modified_base 8: mod_base = OTHER; note = 2'-O-methyluridine-3'-phosphate
  modified_base 9: mod_base = OTHER; note = 2'-fluoroguanosine-3'-phosphate
  modified_base 10: mod_base = OTHER; note = 2'-fluorocytidine-3'-phosphate
  modified_base 11: mod_base = OTHER; note = 2'-fluoroadenosine-3'-phosphate
  modified_base 12: mod_base = OTHER; note = 2'-O-methylguanosine-3'-phosphate
  modified_base 13: mod_base = OTHER; note = 2'-O-methylcytidine-3'-phosphate
  modified_base 14: mod_base = OTHER; note = 2'-O-methyluridine-3'-phosphate
  modified_base 15: mod_base = OTHER; note = 2'-O-methyluridine-3'-phosphate
  modified_base 16: mod_base = OTHER; note = 2'-O-methyladenosine-3'-phosphate
  modified_base 17: mod_base = OTHER; note = 2'-O-methyluridine-3'-phosphate
  modified_base 18: mod_base = OTHER; note = 2'-O-methyladenosine-3'-phosphate
  modified_base 19: mod_base = OTHER; note = 2'-O-methylcytidine-3'-phosphate
  modified_base 20: mod_base = OTHER; note = 2'-O-methylguanosine-3'-phosphate
  modified_base 21: mod_base = OTHER; note = 2'-O-methyladenosine-3'-phosphate attached to N-[tris(N-acetylgalactosamine-alkyl)-amidodecanoyl)]-4-hydr oxyprolinol (Hyp-(GalNAc-alkyl)3)
tctctgatgcagcttatacga

SEQ ID NO: 296 - RNA, 21 nt, synthetic construct
  misc_feature 1..21: note = Description of Artificial Sequence: Synthetic oligonucleotide
  source 1..21: mol_type = other RNA
  modified_base 1: mod_base = OTHER; note = 2'-O-methyluridine-3'-phosphorothioate
  modified_base 2: mod_base = OTHER; note = 2'-O-methyladenosine-3'-phosphorothioate
  modified_base 3: mod_base = OTHER; note = 2'-O-methyladenosine-3'-phosphate
  modified_base 4: mod_base = OTHER; note = 2'-O-methyluridine-3'-phosphate
  modified_base 5: mod_base = OTHER; note = 2'-O-methylguanosine-3'-phosphate
  modified_base 6: mod_base = OTHER; note = 2'-O-methylguanosine-3'-phosphate
  modified_base 7: mod_base = OTHER; note = 2'-fluorocytidine-3'-phosphate
  modified_base 8: mod_base = OTHER; note = 2'-O-methyladenosine-3'-phosphate
  modified_base 9: mod_base = OTHER; note = 2'-fluoroguanosine-3'-phosphate
  modified_base 10: mod_base = OTHER; note = 2'-fluorouridine-3'-phosphate
  modified_base 11: mod_base = OTHER; note = 2'-fluorouridine-3'-phosphate
  modified_base 12: mod_base = OTHER; note = 2'-O-methyladenosine-3'-phosphate
  modified_base 13: mod_base = OTHER; note = 2'-O-methyluridine-3'-phosphate
  modified_base 14: mod_base = OTHER; note = 2'-O-methyladenosine-3'-phosphate
  modified_base 15: mod_base = OTHER; note = 2'-O-methyluridine-3'-phosphate
  modified_base 16: mod_base = OTHER; note = 2'-O-methyluridine-3'-phosphate
  modified_base 17: mod_base = OTHER; note = 2'-O-methyluridine-3'-phosphate
  modified_base 18: mod_base = OTHER; note = 2'-O-methyluridine-3'-phosphate
  modified_base 19: mod_base = OTHER; note = 2'-O-methylguanosine-3'-phosphate
  modified_base 20: mod_base = OTHER; note = 2'-O-methylcytidine-3'-phosphate
  modified_base 21: mod_base = OTHER; note = 2'-O-methyladenosine-3'-phosphate attached to N-[tris(N-acetylgalactosamine-alkyl)-amidodecanoyl)]-4-hydr oxyprolinol (Hyp-(GalNAc-alkyl)3)
taatggcagttatattttgca

SEQ ID NO: 297 - RNA, 21 nt, synthetic construct
  misc_feature 1..21: note = Description of Artificial Sequence: Synthetic oligonucleotide
  source 1..21: mol_type = other RNA
  modified_base 1: mod_base = OTHER; note = 2'-O-methylguanosine-3'-phosphorothioate
  modified_base 2: mod_base = OTHER; note = 2'-O-methylguanosine-3'-phosphorothioate
  modified_base 3: mod_base = OTHER; note = 2'-O-methyladenosine-3'-phosphate
  modified_base 4: mod_base = OTHER; note = 2'-O-methylcytidine-3'-phosphate
  modified_base 5: mod_base = OTHER; note = 2'-O-methyluridine-3'-phosphate
  modified_base 6: mod_base = OTHER; note = 2'-O-methylguanosine-3'-phosphate
  modified_base 7: mod_base = OTHER; note = 2'-fluorocytidine-3'-phosphate
  modified_base 8: mod_base = OTHER; note = 2'-O-methyluridine-3'-phosphate
  modified_base 9: mod_base = OTHER; note = 2'-fluorocytidine-3'-phosphate
  modified_base 10: mod_base = OTHER; note = 2'-fluoroadenosine-3'-phosphate
  modified_base 11: mod_base = OTHER; note = 2'-fluoroguanosine-3'-phosphate
  modified_base 12: mod_base = OTHER; note = 2'-O-methylguanosine-3'-phosphate
  modified_base 13: mod_base = OTHER; note = 2'-O-methyladenosine-3'-phosphate
  modified_base 14: mod_base = OTHER; note = 2'-O-methyladenosine-3'-phosphate
  modified_base 15: mod_base = OTHER; note = 2'-O-methyladenosine-3'-phosphate
  modified_base 16: mod_base = OTHER; note = 2'-O-methylcytidine-3'-phosphate
  modified_base 17: mod_base = OTHER; note = 2'-O-methylguanosine-3'-phosphate
  modified_base 18: mod_base = OTHER; note = 2'-O-methyladenosine-3'-phosphate
  modified_base 19: mod_base = OTHER; note = 2'-O-methylguanosine-3'-phosphate
  modified_base 20: mod_base = OTHER; note = 2'-O-methyladenosine-3'-phosphate
  modified_base 21: mod_base = OTHER; note = 2'-O-methyladenosine-3'-phosphate attached to N-[tris(N-acetylgalactosamine-alkyl)-amidodecanoyl)]-4-hydr oxyprolinol (Hyp-(GalNAc-alkyl)3)
ggactgctcaggaaacgagaa

SEQ ID NO: 298 - RNA, 21 nt, synthetic construct
  misc_feature 1..21: note = Description of Artificial Sequence: Synthetic oligonucleotide
  source 1..21: mol_type = other RNA
  modified_base 1: mod_base = OTHER; note = 2'-O-methylguanosine-3'-phosphorothioate
  modified_base 2: mod_base = OTHER; note = 2'-O-methyluridine-3'-phosphorothioate
  modified_base 3: mod_base = OTHER; note = 2'-O-methylguanosine-3'-phosphate
  modified_base 4: mod_base = OTHER; note = 2'-O-methylcytidine-3'-phosphate
  modified_base 5: mod_base = OTHER; note = 2'-O-methyladenosine-3'-phosphate
  modified_base 6: mod_base = OTHER; note = 2'-O-methyladenosine-3'-phosphate
  modified_base 7: mod_base = OTHER; note = 2'-fluoroadenosine-3'-phosphate
  modified_base 8: mod_base = OTHER; note = 2'-O-methylcytidine-3'-phosphate
  modified_base 9: mod_base = OTHER; note = 2'-fluorouridine-3'-phosphate
  modified_base 10: mod_base = OTHER; note = 2'-fluorouridine-3'-phosphate
  modified_base 11: mod_base = OTHER; note = 2'-fluoroguanosine-3'-phosphate
  modified_base 12: mod_base = OTHER; note = 2'-O-methyluridine-3'-phosphate
  modified_base 13: mod_base = OTHER; note = 2'-O-methylcytidine-3'-phosphate
  modified_base 14: mod_base = OTHER; note = 2'-O-methylguanosine-3'-phosphate
  modified_base 15: mod_base = OTHER; note = 2'-O-methylguanosine-3'-phosphate
  modified_base 16: mod_base = OTHER; note = 2'-O-methylguanosine-3'-phosphate
  modified_base 17: mod_base = OTHER; note = 2'-O-methyladenosine-3'-phosphate
  modified_base 18: mod_base = OTHER; note = 2'-O-methylguanosine-3'-phosphate
  modified_base 19: mod_base = OTHER; note = 2'-O-methylguanosine-3'-phosphate
  modified_base 20: mod_base = OTHER; note = 2'-O-methyladenosine-3'-phosphate
  modified_base 21: mod_base = OTHER; note = 2'-O-methyladenosine-3'-phosphate attached to N-[tris(N-acetylgalactosamine-alkyl)-amidodecanoyl)]-4-hydr oxyprolinol (Hyp-(GalNAc-alkyl)3)
gtgcaaacttgtcgggaggaa

SEQ ID NO: 299 - RNA, 23 nt, synthetic construct
  misc_feature 1..23: note = Description of Artificial Sequence: Synthetic oligonucleotide
  source 1..23: mol_type = other RNA
  modified_base 1: mod_base = OTHER; note = 2'-O-methyluridine-3'-phosphorothioate
  modified_base 2: mod_base = OTHER; note = 2'-fluoroadenosine-3'-phosphorothioate
  modified_base 3: mod_base = OTHER; note = 2'-O-methylguanosine-3'-phosphate
  modified_base 4: mod_base = OTHER; note = 2'-O-methyladenosine-3'-phosphate
  modified_base 5: mod_base = OTHER; note = 2'-O-methyladenosine-3'-phosphate
  modified_base 6: mod_base = OTHER; note = 2'-fluorocytidine-3'-phosphate
  modified_base 7: mod_base = OTHER; note = 2'-O-methyladenosine-3'-phosphate
  modified_base 8: mod_base = OTHER; note = 2'-fluoroadenosine-3'-phosphate
  modified_base 9: mod_base = OTHER; note = 2'-fluorocytidine-3'-phosphate
  modified_base 10: mod_base = OTHER; note = 2'-O-methyladenosine-3'-phosphate
  modified_base 11: mod_base = OTHER; note = 2'-O-methyladenosine-3'-phosphate
  modified_base 12: mod_base = OTHER; note = 2'-O-methyluridine-3'-phosphate
  modified_base 13: mod_base = OTHER; note = 2'-O-methyluridine-3'-phosphate
  modified_base 14: mod_base = OTHER; note = 2'-fluoroadenosine-3'-phosphate
  modified_base 15: mod_base = OTHER; note = 2'-O-methyluridine-3'-phosphate
  modified_base 16: mod_base = OTHER; note = 2'-fluorouridine-3'-phosphate
  modified_base 17: mod_base = OTHER; note = 2'-O-methyluridine-3'-phosphate
  modified_base 18: mod_base = OTHER; note = 2'-O-methylcytidine-3'-phosphate
  modified_base 19: mod_base = OTHER; note = 2'-O-methylguanosine-3'-phosphate
  modified_base 20: mod_base = OTHER; note = 2'-O-methyluridine-3'-phosphate
  modified_base 21: mod_base = OTHER; note = 2'-O-methyladenosine-3'-phosphorothioate
  modified_base 22: mod_base = OTHER; note = 2'-O-methyluridine-3'-phosphorothioate
  modified_base 23: mod_base = OTHER; note = 2'-O-methyladenosine-3'-phosphate
tagaacaacaattatttcgtata

SEQ ID NO: 300 - RNA, 23 nt, synthetic construct
  misc_feature 1..23: note = Description of Artificial Sequence: Synthetic oligonucleotide
  source 1..23: mol_type = other RNA
  modified_base 1: mod_base = OTHER; note = 2'-O-methyluridine-3'-phosphorothioate
  modified_base 2: mod_base = OTHER; note = 2'-fluoroadenosine-3'-phosphorothioate
  modified_base 3: mod_base = OTHER; note = 2'-O-methylguanosine-3'-phosphate
  modified_base 4: mod_base = OTHER; note = 2'-O-methylcytidine-3'-phosphate
  modified_base 5: mod_base = OTHER; note = 2'-O-methyluridine-3'-phosphate
  modified_base 6: mod_base = OTHER; note = 2'-fluoroadenosine-3'-phosphate
  modified_base 7: mod_base = OTHER; note = 2'-O-methyladenosine-3'-phosphate
  modified_base 8: mod_base = OTHER; note = 2'-fluorocytidine-3'-phosphate
  modified_base 9: mod_base = OTHER; note = 2'-fluorouridine-3'-phosphate
  modified_base 10: mod_base = OTHER; note = 2'-O-methyladenosine-3'-phosphate
  modified_base 11: mod_base = OTHER; note = 2'-O-methyluridine-3'-phosphate
  modified_base 12: mod_base = OTHER; note = 2'-O-methyladenosine-3'-phosphate
  modified_base 13: mod_base = OTHER; note = 2'-O-methyluridine-3'-phosphate
  modified_base 14: mod_base = OTHER; note = 2'-fluoroguanosine-3'-phosphate
  modified_base 15: mod_base = OTHER; note = 2'-O-methyladenosine-3'-phosphate
  modified_base 16: mod_base = OTHER; note = 2'-fluoroadenosine-3'-phosphate
  modified_base 17: mod_base = OTHER; note = 2'-O-methyladenosine-3'-phosphate
  modified_base 18: mod_base = OTHER; note = 2'-O-methylguanosine-3'-phosphate
  modified_base 19: mod_base = OTHER; note = 2'-O-methylguanosine-3'-phosphate
  modified_base 20: mod_base = OTHER; note = 2'-O-methyladenosine-3'-phosphate
  modified_base 21: mod_base = OTHER; note = 2'-O-methyluridine-3'-phosphorothioate
  modified_base 22: mod_base = OTHER; note = 2'-O-methyladenosine-3'-phosphorothioate
  modified_base 23: mod_base = OTHER; note = 2'-O-methyladenosine-3'-phosphate
tagctaactatatgaaaggataa

SEQ ID NO: 301 - RNA, 23 nt, synthetic construct
  misc_feature 1..23: note = Description of Artificial Sequence: Synthetic oligonucleotide
  source 1..23: mol_type = other RNA
  modified_base 1: mod_base = OTHER; note = 2'-O-methyluridine-3'-phosphorothioate
  modified_base 2: mod_base = OTHER; note = 2'-fluoroadenosine-3'-phosphorothioate
  modified_base 3: mod_base = OTHER; note = 2'-O-methyladenosine-3'-phosphate
  modified_base 4: mod_base = OTHER; note = 2'-O-methyladenosine-3'-phosphate
  modified_base 5: mod_base = OTHER; note = 2'-O-methyluridine-3'-phosphate
  modified_base 6: mod_base = OTHER; note = 2'-fluoroguanosine-3'-phosphate
  modified_base 7: mod_base = OTHER; note = 2'-O-methyluridine-3'-phosphate
  modified_base 8: mod_base = OTHER; note = 2'-fluoroadenosine-3'-phosphate
  modified_base 9: mod_base = OTHER; note = 2'-fluoroadenosine-3'-phosphate
  modified_base 10: mod_base = OTHER; note = 2'-O-methylguanosine-3'-phosphate
  modified_base 11: mod_base = OTHER; note = 2'-O-methyluridine-3'-phosphate
  modified_base 12: mod_base = OTHER; note = 2'-O-methylguanosine-3'-phosphate
  modified_base 13: mod_base = OTHER; note = 2'-O-methylguanosine-3'-phosphate
  modified_base 14: mod_base = OTHER; note = 2'-fluoroguanosine-3'-phosphate
  modified_base 15: mod_base = OTHER; note = 2'-O-methylcytidine-3'-phosphate
  modified_base 16: mod_base = OTHER; note = 2'-fluorouridine-3'-phosphate
  modified_base 17: mod_base = OTHER; note = 2'-O-methyladenosine-3'-phosphate
  modified_base 18: mod_base = OTHER; note = 2'-O-methyluridine-3'-phosphate
  modified_base 19: mod_base = OTHER; note = 2'-O-methylguanosine-3'-phosphate
  modified_base 20: mod_base = OTHER; note = 2'-O-methyluridine-3'-phosphate
  modified_base 21: mod_base = OTHER; note = 2'-O-methylguanosine-3'-phosphorothioate
  modified_base 22: mod_base = OTHER; note = 2'-O-methyladenosine-3'-phosphorothioate
  modified_base 23: mod_base = OTHER; note = 2'-O-methyladenosine-3'-phosphate
taaatgtaagtgggctatgtgaa

SEQ ID NO: 302 - RNA, 23 nt, synthetic construct
  misc_feature 1..23: note = Description of Artificial Sequence: Synthetic oligonucleotide
  source 1..23: mol_type = other RNA
  modified_base 1: mod_base = OTHER; note = 2'-O-methyluridine-3'-phosphorothioate
  modified_base 2: mod_base = OTHER; note = 2'-fluorouridine-3'-phosphorothioate
  modified_base 3: mod_base = OTHER; note = 2'-O-methyluridine-3'-phosphate
  modified_base 4: mod_base = OTHER; note = 2'-O-methyladenosine-3'-phosphate
  modified_base 5: mod_base = OTHER; note = 2'-O-methyluridine-3'-phosphate
  modified_base 6: mod_base = OTHER; note = 2'-fluorouridine-3'-phosphate
  modified_base 7: mod_base = OTHER; note = 2'-O-methyladenosine-3'-phosphate
  modified_base 8: mod_base = OTHER; note = 2'-fluoroguanosine-3'-phosphate
  modified_base 9: mod_base = OTHER; note = 2'-fluorouridine-3'-phosphate
  modified_base 10: mod_base = OTHER; note = 2'-O-methyladenosine-3'-phosphate
  modified_base 11: mod_base = OTHER; note = 2'-O-methyluridine-3'-phosphate
  modified_base 12: mod_base = OTHER; note = 2'-O-methylcytidine-3'-phosphate
  modified_base 13: mod_base = OTHER; note = 2'-O-methyladenosine-3'-phosphate
  modified_base 14: mod_base = OTHER; note = 2'-fluorouridine-3'-phosphate
  modified_base 15: mod_base = OTHER; note = 2'-O-methylcytidine-3'-phosphate
  modified_base 16: mod_base = OTHER; note = 2'-fluorocytidine-3'-phosphate
  modified_base 17: mod_base = OTHER; note = 2'-O-methyladenosine-3'-phosphate
  modified_base 18: mod_base = OTHER; note = 2'-O-methylguanosine-3'-phosphate
  modified_base 19: mod_base = OTHER; note = 2'-O-methylguanosine-3'-phosphate
  modified_base 20: mod_base = OTHER; note = 2'-O-methyladenosine-3'-phosphate
  modified_base 21: mod_base = OTHER; note = 2'-O-methylcytidine-3'-phosphorothioate
  modified_base 22: mod_base = OTHER; note = 2'-O-methyluridine-3'-phosphorothioate
  modified_base 23: mod_base = OTHER; note = 2'-O-methylcytidine-3'-phosphate
tttattagtatcatccaggactc

SEQ ID NO: 303 - RNA, 23 nt, synthetic construct
  misc_feature 1..23: note = Description of Artificial Sequence: Synthetic oligonucleotide
  source 1..23: mol_type = other RNA
  modified_base 1: mod_base = OTHER; note = 2'-O-methyladenosine-3'-phosphorothioate
  modified_base 2: mod_base = OTHER; note = 2'-fluoroadenosine-3'-phosphorothioate
  modified_base 3: mod_base = OTHER; note = 2'-O-methyluridine-3'-phosphate
  modified_base 4: mod_base = OTHER; note = 2'-O-methylguanosine-3'-phosphate
  modified_base 5: mod_base = OTHER; note = 2'-O-methyluridine-3'-phosphate
  modified_base 6: mod_base = OTHER; note = 2'-fluoroadenosine-3'-phosphate
  modified_base 7: mod_base = OTHER; note = 2'-O-methyladenosine-3'-phosphate
  modified_base 8: mod_base = OTHER; note = 2'-fluoroguanosine-3'-phosphate
  modified_base 9: mod_base = OTHER; note = 2'-fluorouridine-3'-phosphate
  modified_base 10: mod_base = OTHER; note = 2'-O-methylguanosine-3'-phosphate
  modified_base 11: mod_base = OTHER; note = 2'-O-methylguanosine-3'-phosphate
  modified_base 12: mod_base = OTHER; note = 2'-O-methylguanosine-3'-phosphate
  modified_base 13: mod_base = OTHER; note = 2'-O-methylcytidine-3'-phosphate
  modified_base 14: mod_base = OTHER; note = 2'-fluorouridine-3'-phosphate
  modified_base 15: mod_base = OTHER; note = 2'-O-methyladenosine-3'-phosphate
  modified_base 16: mod_base = OTHER; note = 2'-fluorouridine-3'-phosphate
  modified_base 17: mod_base = OTHER; note = 2'-O-methylguanosine-3'-phosphate
  modified_base 18: mod_base = OTHER; note = 2'-O-methyluridine-3'-phosphate
  modified_base 19: mod_base = OTHER; note = 2'-O-methylguanosine-3'-phosphate
  modified_base 20: mod_base = OTHER; note = 2'-O-methyladenosine-3'-phosphate
  modified_base 21: mod_base = OTHER; note = 2'-O-methyladenosine-3'-phosphorothioate
  modified_base 22: mod_base = OTHER; note = 2'-O-methyladenosine-3'-phosphorothioate
  modified_base 23: mod_base = OTHER; note = 2'-O-methyluridine-3'-phosphate
aatgtaagtgggctatgtgaaat

SEQ ID NO: 304 - RNA, 23 nt, synthetic construct
  misc_feature 1..23: note = Description of Artificial Sequence: Synthetic oligonucleotide
  source 1..23: mol_type = other RNA
  modified_base 1: mod_base = OTHER; note = 2'-O-methyluridine-3'-phosphorothioate
  modified_base 2: mod_base = OTHER; note = 2'-fluoroguanosine-3'-phosphorothioate
  modified_base 3: mod_base = OTHER; note = 2'-O-methyluridine-3'-phosphate
  modified_base 4: mod_base = OTHER; note = 2'-O-methyladenosine-3'-phosphate
  modified_base 5: mod_base = OTHER; note = 2'-O-methyladenosine-3'-phosphate
  modified_base 6: mod_base = OTHER; note = 2'-fluoroadenosine-3'-phosphate
  modified_base 7: mod_base = OTHER; note = 2'-O-methyluridine-3'-phosphate
  modified_base 8: mod_base = OTHER; note = 2'-fluoroguanosine-3'-phosphate
  modified_base 9: mod_base = OTHER; note = 2'-fluorouridine-3'-phosphate
  modified_base 10: mod_base = OTHER; note = 2'-O-methyladenosine-3'-phosphate
  modified_base 11: mod_base = OTHER; note = 2'-O-methyladenosine-3'-phosphate
  modified_base 12: mod_base = OTHER; note = 2'-O-methylguanosine-3'-phosphate
  modified_base 13: mod_base = OTHER; note = 2'-O-methyluridine-3'-phosphate
  modified_base 14: mod_base = OTHER; note = 2'-fluoroguanosine-3'-phosphate
  modified_base 15: mod_base = OTHER; note = 2'-O-methylguanosine-3'-phosphate
  modified_base 16: mod_base = OTHER; note = 2'-fluoroguanosine-3'-phosphate
  modified_base 17: mod_base = OTHER; note = 2'-O-methylcytidine-3'-phosphate
  modified_base 18: mod_base = OTHER; note = 2'-O-methyluridine-3'-phosphate
  modified_base 19: mod_base = OTHER; note = 2'-O-methyladenosine-3'-phosphate
  modified_base 20: mod_base = OTHER; note = 2'-O-methyluridine-3'-phosphate
  modified_base 21: mod_base = OTHER; note = 2'-O-methylguanosine-3'-phosphorothioate
  modified_base 22: mod_base = OTHER; note = 2'-O-methyluridine-3'-phosphorothioate
  modified_base 23: mod_base = OTHER; note = 2'-O-methylguanosine-3'-phosphate
tgtaaatgtaagtgggctatgtg

SEQ ID NO: 305 - RNA, 23 nt, synthetic construct
  misc_feature 1..23: note = Description of Artificial Sequence: Synthetic oligonucleotide
  source 1..23: mol_type = other RNA
  modified_base 1: mod_base = OTHER; note = 2'-O-methyladenosine-3'-phosphorothioate
  modified_base 2: mod_base = OTHER; note = 2'-fluoroadenosine-3'-phosphorothioate
  modified_base 3: mod_base = OTHER; note = 2'-O-methyladenosine-3'-phosphate
  modified_base 4: mod_base = OTHER; note = 2'-O-methylguanosine-3'-phosphate
  modified_base 5: mod_base = OTHER; note = 2'-O-methyladenosine-3'-phosphate
  modified_base 6: mod_base = OTHER; note = 2'-fluoroadenosine-3'-phosphate
  modified_base 7: mod_base = OTHER; note = 2'-O-methyluridine-3'-phosphate
  modified_base 8: mod_base = OTHER; note = 2'-fluoroadenosine-3'-phosphate
  modified_base 9: mod_base = OTHER; note = 2'-fluoroguanosine-3'-phosphate
  modified_base 10: mod_base = OTHER; note = 2'-O-methyladenosine-3'-phosphate
  modified_base 11: mod_base = OTHER; note = 2'-O-methylguanosine-3'-phosphate
  modified_base 12: mod_base = OTHER; note = 2'-O-methyluridine-3'-phosphate
  modified_base 13: mod_base = OTHER; note = 2'-O-methylcytidine-3'-phosphate
  modified_base 14: mod_base = OTHER; note = 2'-fluorocytidine-3'-phosphate
  modified_base 15: mod_base = OTHER; note = 2'-O-methyluridine-3'-phosphate
  modified_base 16: mod_base = OTHER; note = 2'-fluorocytidine-3'-phosphate
  modified_base 17: mod_base = OTHER; note = 2'-O-methyladenosine-3'-phosphate
  modified_base 18: mod_base = OTHER; note = 2'-O-methyluridine-3'-phosphate
  modified_base 19: mod_base = OTHER; note = 2'-O-methylguanosine-3'-phosphate
  modified_base 20: mod_base = OTHER; note = 2'-O-methyluridine-3'-phosphate
  modified_base 21: mod_base = OTHER; note = 2'-O-methyladenosine-3'-phosphorothioate
  modified_base 22: mod_base = OTHER; note = 2'-O-methyladenosine-3'-phosphorothioate
  modified_base 23: mod_base = OTHER; note = 2'-O-methyladenosine-3'-phosphate
aaagaatagagtcctcatgtaaa

SEQ ID NO: 306 - RNA, 23 nt, synthetic construct
  misc_feature 1..23: note = Description of Artificial Sequence: Synthetic oligonucleotide
  source 1..23: mol_type = other RNA
  modified_base 1: mod_base = OTHER; note = 2'-O-methyladenosine-3'-phosphorothioate
  modified_base 2: mod_base = OTHER; note = 2'-fluoroguanosine-3'-phosphorothioate
  modified_base 3: mod_base = OTHER; note = 2'-O-methyluridine-3'-phosphate
  modified_base 4: mod_base = OTHER; note = 2'-O-methyluridine-3'-phosphate
  modified_base 5: mod_base = OTHER; note = 2'-O-methyladenosine-3'-phosphate
  modified_base 6: mod_base = OTHER; note = 2'-fluoroadenosine-3'-phosphate
  modified_base 7: mod_base = OTHER; note = 2'-O-methyladenosine-3'-phosphate
  modified_base 8: mod_base = OTHER; note = 2'-fluoroguanosine-3'-phosphate
  modified_base 9: mod_base = OTHER; note = 2'-fluoroadenosine-3'-phosphate
  modified_base 10: mod_base = OTHER; note = 2'-O-methyladenosine-3'-phosphate
  modified_base 11: mod_base = OTHER; note = 2'-O-methyluridine-3'-phosphate
  modified_base 12: mod_base = OTHER; note = 2'-O-methyladenosine-3'-phosphate
  modified_base 13: mod_base = OTHER; note = 2'-O-methylguanosine-3'-phosphate
  modified_base 14: mod_base = OTHER; note = 2'-fluoroadenosine-3'-phosphate
  modified_base 15: mod_base = OTHER; note = 2'-O-methylguanosine-3'-phosphate
  modified_base 16: mod_base = OTHER; note = 2'-fluorouridine-3'-phosphate
  modified_base 17: mod_base = OTHER; note = 2'-O-methylcytidine-3'-phosphate
  modified_base 18: mod_base = OTHER; note = 2'-O-methylcytidine-3'-phosphate
  modified_base 19: mod_base = OTHER; note = 2'-O-methyluridine-3'-phosphate
  modified_base 20: mod_base = OTHER; note = 2'-O-methylcytidine-3'-phosphate
  modified_base 21: mod_base = OTHER; note = 2'-O-methyladenosine-3'-phosphorothioate
  modified_base 22: mod_base = OTHER; note = 2'-O-methyluridine-3'-phosphorothioate
  modified_base 23: mod_base = OTHER; note = 2'-O-methylguanosine-3'-phosphate
agttaaagaatagagtcctcatg

SEQ ID NO: 307 - RNA, 23 nt, synthetic construct
  misc_feature 1..23: note = Description of Artificial Sequence: Synthetic oligonucleotide
  source 1..23: mol_type = other RNA
  modified_base 1: mod_base = OTHER; note = 2'-O-methyluridine-3'-phosphorothioate
  modified_base 2: mod_base = OTHER; note = 2'-fluorouridine-3'-phosphorothioate
  modified_base 3: mod_base = OTHER; note = 2'-O-methylguanosine-3'-phosphate
  modified_base 4: mod_base = OTHER; note = 2'-O-methyluridine-3'-phosphate
  modified_base 5: mod_base = OTHER; note = 2'-O-methyladenosine-3'-phosphate
  modified_base 6: mod_base = OTHER; note = 2'-fluorouridine-3'-phosphate
  modified_base 7: mod_base = OTHER; note = 2'-O-methyluridine-3'-phosphate
  modified_base 8: mod_base = OTHER; note = 2'-fluorouridine-3'-phosphate
  modified_base 9: mod_base = OTHER; note = 2'-fluorouridine-3'-phosphate
  modified_base 10: mod_base = OTHER; note = 2'-O-methyladenosine-3'-phosphate
  modified_base 11: mod_base = OTHER; note = 2'-O-methyladenosine-3'-phosphate
  modified_base 12: mod_base = OTHER; note = 2'-O-methylguanosine-3'-phosphate
  modified_base 13: mod_base = OTHER; note = 2'-O-methylcytidine-3'-phosphate
  modified_base 14: mod_base = OTHER; note = 2'-fluorouridine-3'-phosphate
  modified_base 15: mod_base = OTHER; note = 2'-O-methylcytidine-3'-phosphate
  modified_base 16: mod_base = OTHER; note = 2'-fluoroadenosine-3'-phosphate
  modified_base 17: mod_base = OTHER; note = 2'-O-methylcytidine-3'-phosphate
  modified_base 18: mod_base = OTHER; note = 2'-O-methylguanosine-3'-phosphate
  modified_base 19: mod_base = OTHER; note = 2'-O-methylcytidine-3'-phosphate
  modified_base 20: mod_base = OTHER; note = 2'-O-methyluridine-3'-phosphate
  modified_base 21: mod_base = OTHER; note = 2'-O-methyluridine-3'-phosphorothioate
  modified_base 22: mod_base = OTHER; note = 2'-O-methyluridine-3'-phosphorothioate
  modified_base 23: mod_base = OTHER; note = 2'-O-methyluridine-3'-phosphate
ttgtattttaagctcacgctttt

SEQ ID NO: 308 - RNA, 23 nt, synthetic construct
  misc_feature 1..23: note = Description of Artificial Sequence: Synthetic oligonucleotide
  source 1..23: mol_type = other RNA
  modified_base 1: mod_base = OTHER; note = 2'-O-methyladenosine-3'-phosphorothioate
  modified_base 2: mod_base = OTHER; note = 2'-fluoroadenosine-3'-phosphorothioate
  modified_base 3: mod_base = OTHER; note = 2'-O-methyladenosine-3'-phosphate
  modified_base 4: mod_base = OTHER; note = 2'-O-methyladenosine-3'-phosphate
  modified_base 5: mod_base = OTHER; note = 2'-O-methylcytidine-3'-phosphate
  modified_base 6: mod_base = OTHER; note = 2'-fluoroguanosine-3'-phosphate
  modified_base 7: mod_base = OTHER; note = 2'-O-methyladenosine-3'-phosphate
  modified_base 8: mod_base = OTHER; note = 2'-fluorouridine-3'-phosphate
  modified_base 9: mod_base = OTHER; note = 2'-fluoroadenosine-3'-phosphate
  modified_base 10: mod_base = OTHER; note = 2'-O-methyladenosine-3'-phosphate
  modified_base 11: mod_base = OTHER; note = 2'-O-methyluridine-3'-phosphate
  modified_base 12: mod_base = OTHER; note = 2'-O-methylcytidine-3'-phosphate
  modified_base 13: mod_base = OTHER; note = 2'-O-methyluridine-3'-phosphate
  modified_base 14: mod_base = OTHER; note = 2'-fluorocytidine-3'-phosphate
  modified_base 15: mod_base = OTHER; note = 2'-O-methylguanosine-3'-phosphate
  modified_base 16: mod_base = OTHER; note = 2'-fluoroadenosine-3'-phosphate
  modified_base 17: mod_base = OTHER; note = 2'-O-methyladenosine-3'-phosphate
  modified_base 18: mod_base = OTHER; note = 2'-O-methyladenosine-3'-phosphate
  modified_base 19: mod_base = OTHER; note = 2'-O-methyladenosine-3'-phosphate
  modified_base 20: mod_base = OTHER; note = 2'-O-methylcytidine-3'-phosphate
  modified_base 21: mod_base = OTHER; note = 2'-O-methylcytidine-3'-phosphorothioate
  modified_base 22: mod_base = OTHER; note = 2'-O-methyladenosine-3'-phosphorothioate
  modified_base 23: mod_base = OTHER; note = 2'-O-methylcytidine-3'-phosphate
aaaacgataatctcgaaaaccac

SEQ ID NO: 309 - RNA, 23 nt, synthetic construct
  misc_feature 1..23: note = Description of Artificial Sequence: Synthetic oligonucleotide
  source 1..23: mol_type = other RNA
  modified_base 1: mod_base = OTHER; note = 2'-O-methyladenosine-3'-phosphorothioate
  modified_base 2: mod_base = OTHER; note = 2'-fluoroadenosine-3'-phosphorothioate
  modified_base 3: mod_base = OTHER; note = 2'-O-methylguanosine-3'-phosphate
  modified_base 4: mod_base = OTHER; note = 2'-O-methyladenosine-3'-phosphate
  modified_base 5: mod_base = OTHER; note = 2'-O-methyladenosine-3'-phosphate
  modified_base 6: mod_base = OTHER; note = 2'-fluorocytidine-3'-phosphate
  modified_base 7: mod_base = OTHER; note = 2'-O-methylguanosine-3'-phosphate
  modified_base 8: mod_base = OTHER; note = 2'-fluorocytidine-3'-phosphate
  modified_base 9: mod_base = OTHER; note = 2'-fluorouridine-3'-phosphate
  modified_base 10: mod_base = OTHER; note = 2'-O-methyladenosine-3'-phosphate
  modified_base 11: mod_base = OTHER; note = 2'-O-methyluridine-3'-phosphate
  modified_base 12: mod_base = OTHER; note = 2'-O-methyluridine-3'-phosphate
  modified_base 13: mod_base = OTHER; note = 2'-O-methyluridine-3'-phosphate
  modified_base 14: mod_base = OTHER; note = 2'-fluorouridine-3'-phosphate
  modified_base 15: mod_base = OTHER; note = 2'-O-methyladenosine-3'-phosphate
  modified_base 16: mod_base = OTHER; note = 2'-fluoroadenosine-3'-phosphate
  modified_base 17: mod_base = OTHER; note = 2'-O-methyladenosine-3'-phosphate
  modified_base 18: mod_base = OTHER; note = 2'-O-methyladenosine-3'-phosphate
  modified_base 19: mod_base = OTHER; note = 2'-O-methyluridine-3'-phosphate
  modified_base 20: mod_base = OTHER; note = 2'-O-methyladenosine-3'-phosphate
  modified_base 21: mod_base = OTHER; note = 2'-O-methylcytidine-3'-phosphorothioate
  modified_base 22: mod_base = OTHER; note = 2'-O-methyluridine-3'-phosphorothioate
  modified_base 23: mod_base = OTHER; note = 2'-O-methylguanosine-3'-phosphate
aagaacgctattttaaaatactg

SEQ ID NO: 310 - RNA, 23 nt, synthetic construct
  misc_feature 1..23: note = Description of Artificial Sequence: Synthetic oligonucleotide
  source 1..23: mol_type = other RNA
  modified_base 1: mod_base = OTHER; note = 2'-O-methyluridine-3'-phosphorothioate
  modified_base 2: mod_base = OTHER; note = 2'-fluoroadenosine-3'-phosphorothioate
  modified_base 3: mod_base = OTHER; note = 2'-O-methylcytidine-3'-phosphate
  modified_base 4: mod_base = OTHER; note = 2'-O-methylcytidine-3'-phosphate
  modified_base 5: mod_base = OTHER; note = 2'-O-methyluridine-3'-phosphate
  modified_base 6: mod_base = OTHER; note = 2'-fluoroadenosine-3'-phosphate
  modified_base 7: mod_base = OTHER; note = 2'-O-methyluridine-3'-phosphate
  modified_base 8: mod_base = OTHER; note = 2'-fluoroguanosine-3'-phosphate
  modified_base 9: mod_base = OTHER; note = 2'-fluoroadenosine-3'-phosphate
  modified_base 10: mod_base = OTHER; note = 2'-O-methyladenosine-3'-phosphate
  modified_base 11: mod_base = OTHER; note = 2'-O-methyladenosine-3'-phosphate
  modified_base 12: mod_base = OTHER; note = 2'-O-methyladenosine-3'-phosphate
  modified_base 13: mod_base = OTHER; note = 2'-O-methylguanosine-3'-phosphate
  modified_base 14: mod_base = OTHER; note = 2'-fluoroguanosine-3'-phosphate
  modified_base 15: mod_base = OTHER; note = 2'-O-methyladenosine-3'-phosphate
  modified_base 16: mod_base = OTHER; note = 2'-fluorocytidine-3'-phosphate
  modified_base 17: mod_base = OTHER; note = 2'-O-methyladenosine-3'-phosphate
  modified_base 18: mod_base = OTHER; note = 2'-O-methyladenosine-3'-phosphate
  modified_base 19: mod_base = OTHER; note = 2'-O-methylcytidine-3'-phosphate
  modified_base 20: mod_base = OTHER; note = 2'-O-methyladenosine-3'-phosphate
  modified_base 21: mod_base = OTHER; note = 2'-O-methyladenosine-3'-phosphorothioate
  modified_base 22: mod_base = OTHER; note = 2'-O-methyluridine-3'-phosphorothioate
  modified_base 23: mod_base = OTHER; note = 2'-O-methyladenosine-3'-phosphate
tacctatgaaaaggacaacaata

SEQ ID NO: 311 - RNA, 23 nt, synthetic construct
  misc_feature 1..23: note = Description of Artificial Sequence: Synthetic oligonucleotide
  source 1..23: mol_type = other RNA
  modified_base 1: mod_base = OTHER; note = 2'-O-methyluridine-3'-phosphorothioate
  modified_base 2: mod_base = OTHER; note = 2'-fluorouridine-3'-phosphorothioate
  modified_base 3: mod_base = OTHER; note = 2'-O-methyladenosine-3'-phosphate
  modified_base 4: mod_base = OTHER; note = 2'-O-methyladenosine-3'-phosphate
  modified_base 5: mod_base = OTHER; note = 2'-O-methyluridine-3'-phosphate
  modified_base 6: mod_base = OTHER; note = 2'-fluoroguanosine-3'-phosphate
  modified_base 7: mod_base = OTHER; note = 2'-O-methylguanosine-3'-phosphate
  modified_base 8: mod_base = OTHER; note = 2'-fluoroadenosine-3'-phosphate
  modified_base 9: mod_base = OTHER; note = 2'-fluoroadenosine-3'-phosphate
  modified_base 10: mod_base = OTHER; note = 2'-O-methyladenosine-3'-phosphate
  modified_base 11: mod_base = OTHER; note = 2'-O-methylguanosine-3'-phosphate
  modified_base 12: mod_base = OTHER; note = 2'-O-methyluridine-3'-phosphate
  modified_base 13: mod_base = OTHER; note = 2'-O-methylcytidine-3'-phosphate
  modified_base 14: mod_base = OTHER; note = 2'-fluorouridine-3'-phosphate
  modified_base 15: mod_base = OTHER; note = 2'-O-methylcytidine-3'-phosphate
  modified_base 16: mod_base = OTHER; note = 2'-fluoroguanosine-3'-phosphate
  modified_base 17: mod_base = OTHER; note = 2'-O-methyluridine-3'-phosphate
  modified_base 18: mod_base = OTHER; note = 2'-O-methyluridine-3'-phosphate
  modified_base 19: mod_base = OTHER; note = 2'-O-methyluridine-3'-phosphate
  modified_base 20: mod_base = OTHER; note = 2'-O-methylcytidine-3'-phosphate
  modified_base 21: mod_base = OTHER; note = 2'-O-methylcytidine-3'-phosphorothioate
  modified_base 22: mod_base = OTHER; note = 2'-O-methyluridine-3'-phosphorothioate
  modified_base 23: mod_base = OTHER; note = 2'-O-methylguanosine-3'-phosphate
ttaatggaaagtctcgtttcctg

SEQ ID NO: 312 - RNA, 23 nt, synthetic construct
  misc_feature 1..23: note = Description of Artificial Sequence: Synthetic oligonucleotide
  source 1..23: mol_type = other RNA
  modified_base 1: mod_base = OTHER; note = 2'-O-methyluridine-3'-phosphorothioate
  modified_base 2: mod_base = OTHER; note = 2'-fluoroadenosine-3'-phosphorothioate
  modified_base 3: mod_base = OTHER; note = 2'-O-methyladenosine-3'-phosphate
  modified_base 4: mod_base = OTHER; note = 2'-O-methyladenosine-3'-phosphate
  modified_base 5: mod_base = OTHER; note = 2'-O-methyladenosine-3'-phosphate
  modified_base 6: mod_base = OTHER; note = 2'-fluorocytidine-3'-phosphate
  modified_base 7: mod_base = OTHER; note = 2'-O-methylguanosine-3'-phosphate
  modified_base 8: mod_base = OTHER; note = 2'-fluoroadenosine-3'-phosphate
  modified_base 9: mod_base = OTHER; note = 2'-fluorouridine-3'-phosphate
  modified_base 10: mod_base = OTHER; note = 2'-O-methyladenosine-3'-phosphate
  modified_base 11: mod_base = OTHER; note = 2'-O-methyladenosine-3'-phosphate
  modified_base 12: mod_base = OTHER; note = 2'-O-methyluridine-3'-phosphate
  modified_base 13: mod_base = OTHER; note = 2'-O-methylcytidine-3'-phosphate
  modified_base 14: mod_base = OTHER; note = 2'-fluorouridine-3'-phosphate
  modified_base 15: mod_base = OTHER; note = 2'-O-methylcytidine-3'-phosphate
  modified_base 16: mod_base = OTHER; note = 2'-fluoroguanosine-3'-phosphate
  modified_base 17: mod_base = OTHER; note = 2'-O-methyladenosine-3'-phosphate
  modified_base 18: mod_base = OTHER; note = 2'-O-methyladenosine-3'-phosphate
  modified_base 19: mod_base = OTHER; note = 2'-O-methyladenosine-3'-phosphate
  modified_base 20: mod_base = OTHER; note = 2'-O-methyladenosine-3'-phosphate
  modified_base 21: mod_base = OTHER; note = 2'-O-methylcytidine-3'-phosphorothioate
  modified_base 22: mod_base = OTHER; note = 2'-O-methylcytidine-3'-phosphorothioate
  modified_base 23: mod_base = OTHER; note = 2'-O-methyladenosine-3'-phosphate
taaaacgataatctcgaaaacca

SEQ ID NO: 313 - RNA, 23 nt, synthetic construct
  misc_feature 1..23: note = Description of Artificial Sequence: Synthetic oligonucleotide
  source 1..23: mol_type = other RNA
  modified_base 1: mod_base = OTHER; note = 2'-O-methyladenosine-3'-phosphorothioate
  modified_base 2: mod_base = OTHER; note = 2'-fluorouridine-3'-phosphorothioate
  modified_base 3: mod_base = OTHER; note = 2'-O-methyladenosine-3'-phosphate
  modified_base 4: mod_base = OTHER; note = 2'-O-methyluridine-3'-phosphate
  modified_base 5: mod_base = OTHER; note = 2'-O-methyladenosine-3'-phosphate
  modified_base 6: mod_base = OTHER; note = 2'-fluoroadenosine-3'-phosphate
  modified_base 7: mod_base = OTHER; note = 2'-O-methylcytidine-3'-phosphate
  modified_base 8: mod_base = OTHER; note = 2'-fluoroadenosine-3'-phosphate
  modified_base 9: mod_base = OTHER; note = 2'-fluoroadenosine-3'-phosphate
  modified_base 10: mod_base = OTHER; note = 2'-O-methyladenosine-3'-phosphate
  modified_base 11: mod_base = OTHER; note = 2'-O-methyladenosine-3'-phosphate
  modified_base 12: mod_base = OTHER; note = 2'-O-methylcytidine-3'-phosphate
  modified_base 13: mod_base = OTHER; note = 2'-O-methyladenosine-3'-phosphate
  modified_base 14: mod_base = OTHER; note = 2'-fluoroguanosine-3'-phosphate
  modified_base 15: mod_base = OTHER; note = 2'-O-methylcytidine-3'-phosphate
  modified_base 16: mod_base = OTHER; note = 2'-fluoroadenosine-3'-phosphate
  modified_base 17: mod_base = OTHER; note = 2'-O-methylcytidine-3'-phosphate
  modified_base 18: mod_base = OTHER; note = 2'-O-methyluridine-3'-phosphate
  modified_base 19: mod_base = OTHER; note = 2'-O-methylcytidine-3'-phosphate
  modified_base 20: mod_base = OTHER; note = 2'-O-methylcytidine-3'-phosphate
  modified_base 21: mod_base = OTHER; note = 2'-O-methyladenosine-3'-phosphorothioate
  modified_base 22: mod_base = OTHER; note = 2'-O-methyluridine-3'-phosphorothioate
  modified_base 23: mod_base = OTHER; note = 2'-O-methylcytidine-3'-phosphate
atataacaaaacagcactccatc

SEQ ID NO: 314 - RNA, 23 nt, synthetic construct
  misc_feature 1..23: note = Description of Artificial Sequence: Synthetic oligonucleotide
  source 1..23: mol_type = other RNA
  modified_base 1: mod_base = OTHER; note = 2'-O-methyluridine-3'-phosphorothioate
  modified_base 2: mod_base = OTHER; note = 2'-fluorouridine-3'-phosphorothioate
  modified_base 3: mod_base = OTHER; note = 2'-O-methyluridine-3'-phosphate
  modified_base 4: mod_base = OTHER; note = 2'-O-methylcytidine-3'-phosphate
  modified_base 5: mod_base = OTHER; note = 2'-O-methylguanosine-3'-phosphate
  modified_base 6: mod_base = OTHER; note = 2'-fluorouridine-3'-phosphate
  modified_base 7: mod_base = OTHER; note = 2'-O-methyladenosine-3'-phosphate
  modified_base 8: mod_base = OTHER; note = 2'-fluorouridine-3'-phosphate
  modified_base 9: mod_base = OTHER; note = 2'-fluoroadenosine-3'-phosphate
  modified_base 10: mod_base = OTHER; note = 2'-O-methyladenosine-3'-phosphate
  modified_base 11: mod_base = OTHER; note = 2'-O-methylguanosine-3'-phosphate
  modified_base 12: mod_base = OTHER; note = 2'-O-methylcytidine-3'-phosphate
  modified_base 13: mod_base = OTHER; note = 2'-O-methyluridine-3'-phosphate
  modified_base 14: mod_base = OTHER; note = 2'-fluoroguanosine-3'-phosphate
  modified_base 15: mod_base = OTHER; note = 2'-O-methylcytidine-3'-phosphate
  modified_base 16: mod_base = OTHER; note = 2'-fluoroadenosine-3'-phosphate
  modified_base 17: mod_base = OTHER; note = 2'-O-methyluridine-3'-phosphate
  modified_base 18: mod_base = OTHER; note = 2'-O-methylcytidine-3'-phosphate
  modified_base 19: mod_base = OTHER; note = 2'-O-methyladenosine-3'-phosphate
  modified_base 20: mod_base = OTHER; note = 2'-O-methylguanosine-3'-phosphate
  modified_base 21: mod_base = OTHER; note = 2'-O-methyladenosine-3'-phosphorothioate
  modified_base 22: mod_base = OTHER; note = 2'-O-methylguanosine-3'-phosphorothioate
  modified_base 23: mod_base = OTHER; note = 2'-O-methyladenosine-3'-phosphate
tttcgtataagctgcatcagaga

SEQ ID NO: 315 - RNA, 23 nt, synthetic construct
  misc_feature 1..23: note = Description of Artificial Sequence: Synthetic oligonucleotide
  source 1..23: mol_type = other RNA
  modified_base 1: mod_base = OTHER; note = 2'-O-methyladenosine-3'-phosphorothioate
  modified_base 2: mod_base = OTHER; note = 2'-fluorouridine-3'-phosphorothioate
  modified_base 3: mod_base = OTHER; note = 2'-O-methyluridine-3'-phosphate
  modified_base 4: mod_base = OTHER; note = 2'-O-methyluridine-3'-phosphate
  modified_base 5: mod_base = OTHER; note = 2'-O-methylcytidine-3'-phosphate
  modified_base 6: mod_base = OTHER; note = 2'-fluoroguanosine-3'-phosphate
  modified_base 7: mod_base = OTHER; note = 2'-O-methyluridine-3'-phosphate
  modified_base 8: mod_base = OTHER; note = 2'-fluoroadenosine-3'-phosphate
  modified_base 9: mod_base = OTHER; note = 2'-fluorouridine-3'-phosphate
  modified_base 10: mod_base = OTHER; note = 2'-O-methyladenosine-3'-phosphate
  modified_base 11: mod_base = OTHER; note = 2'-O-methyladenosine-3'-phosphate
  modified_base 12: mod_base = OTHER; note = 2'-O-methylguanosine-3'-phosphate
  modified_base 13: mod_base = OTHER; note = 2'-O-methylcytidine-3'-phosphate
  modified_base 14: mod_base = OTHER; note = 2'-fluorouridine-3'-phosphate
  modified_base 15: mod_base = OTHER; note = 2'-O-methylguanosine-3'-phosphate
  modified_base 16: mod_base = OTHER; note = 2'-fluorocytidine-3'-phosphate
  modified_base 17: mod_base = OTHER; note = 2'-O-methyladenosine-3'-phosphate
  modified_base 18: mod_base = OTHER; note = 2'-O-methyluridine-3'-phosphate
  modified_base 19: mod_base = OTHER; note = 2'-O-methylcytidine-3'-phosphate
  modified_base 20: mod_base = OTHER; note = 2'-O-methyladenosine-3'-phosphate
  modified_base 21: mod_base = OTHER; note = 2'-O-methylguanosine-3'-phosphorothioate
  modified_base 22: mod_base = OTHER; note = 2'-O-methyladenosine-3'-phosphorothioate
  modified_base 23: mod_base = OTHER; note = 2'-O-methylguanosine-3'-phosphate
atttcgtataagctgcatcagag

SEQ ID NO: 316 - RNA, 23 nt, synthetic construct
  misc_feature 1..23: note = Description of Artificial Sequence: Synthetic oligonucleotide
  source 1..23: mol_type = other RNA
  modified_base 1: mod_base = OTHER; note = 2'-O-methyluridine-3'-phosphorothioate
  modified_base 2: mod_base = OTHER; note = 2'-fluoroadenosine-3'-phosphorothioate
  modified_base 3: mod_base = OTHER; note = 2'-O-methylguanosine-3'-phosphate
  modified_base 4: mod_base = OTHER; note = 2'-O-methyluridine-3'-phosphate
  modified_base 5: mod_base = OTHER; note = 2'-O-methyluridine-3'-phosphate
  modified_base 6: mod_base = OTHER; note = 2'-fluoroadenosine-3'-phosphate
  modified_base 7: mod_base = OTHER; note = 2'-O-methyluridine-3'-phosphate
  modified_base 8: mod_base = OTHER; note = 2'-fluoroguanosine-3'-phosphate
  modified_base 9: mod_base = OTHER; note = 2'-fluoroguanosine-3'-phosphate
  modified_base 10: mod_base = OTHER; note = 2'-O-methyladenosine-3'-phosphate
  modified_base 11: mod_base = OTHER; note = 2'-O-methyluridine-3'-phosphate
  modified_base 12: mod_base = OTHER; note = 2'-O-methylguanosine-3'-phosphate
  modified_base 13: mod_base = OTHER; note = 2'-O-methyladenosine-3'-phosphate
  modified_base 14: mod_base = OTHER; note = 2'-fluoroadenosine-3'-phosphate
  modified_base 15: mod_base = OTHER; note = 2'-O-methyladenosine-3'-phosphate
  modified_base 16: mod_base = OTHER; note = 2'-fluoroadenosine-3'-phosphate
  modified_base 17: mod_base = OTHER; note = 2'-O-methylcytidine-3'-phosphate
  modified_base 18: mod_base = OTHER; note = 2'-O-methyluridine-3'-phosphate
  modified_base 19: mod_base = OTHER; note = 2'-O-methyladenosine-3'-phosphate
  modified_base 20: mod_base = OTHER; note = 2'-O-methyluridine-3'-phosphate
  modified_base 21: mod_base = OTHER; note = 2'-O-methylcytidine-3'-phosphorothioate
  modified_base 22: mod_base = OTHER; note = 2'-O-methyluridine-3'-phosphorothioate
  modified_base 23: mod_base = OTHER; note = 2'-O-methylcytidine-3'-phosphate
tagttatggatgaaaactatctc

SEQ ID NO: 317 - RNA, 23 nt, synthetic construct
  misc_feature 1..23: note = Description of Artificial Sequence: Synthetic oligonucleotide
  source 1..23: mol_type = other RNA
  modified_base 1: mod_base = OTHER; note = 2'-O-methyladenosine-3'-phosphorothioate
  modified_base 2: mod_base = OTHER; note = 2'-fluoroadenosine-3'-phosphorothioate
  modified_base 3: mod_base = OTHER; note = 2'-O-methyladenosine-3'-phosphate
  modified_base 4: mod_base = OTHER; note = 2'-O-methyluridine-3'-phosphate
  modified_base 5: mod_base = OTHER; note = 2'-O-methylguanosine-3'-phosphate
  modified_base 6: mod_base = OTHER; note = 2'-fluorouridine-3'-phosphate
  modified_base 7: mod_base = OTHER; note = 2'-O-methyladenosine-3'-phosphate
  modified_base 8: mod_base = OTHER; note = 2'-fluoroadenosine-3'-phosphate
  modified_base 9: mod_base = OTHER; note = 2'-fluoroguanosine-3'-phosphate
  modified_base 10: mod_base = OTHER; note = 2'-O-methyluridine-3'-phosphate
  modified_base 11: mod_base = OTHER; note = 2'-O-methylguanosine-3'-phosphate
  modified_base 12: mod_base = OTHER; note = 2'-O-methylguanosine-3'-phosphate
  modified_base 13: mod_base = OTHER; note = 2'-O-methylguanosine-3'-phosphate
  modified_base 14: mod_base = OTHER; note = 2'-fluorocytidine-3'-phosphate
  modified_base 15: mod_base = OTHER; note = 2'-O-methyluridine-3'-phosphate
  modified_base 16: mod_base = OTHER; note = 2'-fluoroadenosine-3'-phosphate
  modified_base 17: mod_base = OTHER; note = 2'-O-methyluridine-3'-phosphate
  modified_base 18: mod_base = OTHER; note = 2'-O-methylguanosine-3'-phosphate
  modified_base 19: mod_base = OTHER; note = 2'-O-methyluridine-3'-phosphate
  modified_base 20: mod_base = OTHER; note = 2'-O-methylguanosine-3'-phosphate
  modified_base 21: mod_base = OTHER; note = 2'-O-methyladenosine-3'-phosphorothioate
  modified_base 22: mod_base = OTHER; note = 2'-O-methyladenosine-3'-phosphorothioate
  modified_base 23: mod_base = OTHER; note = 2'-O-methyladenosine-3'-phosphate
aaatgtaagtgggctatgtgaaa

SEQ ID NO: 318 - RNA, 23 nt, synthetic construct
  misc_feature 1..23: note = Description of Artificial Sequence: Synthetic oligonucleotide
  source 1..23: mol_type = other RNA
  modified_base 1: mod_base = OTHER; note = 2'-O-methyladenosine-3'-phosphorothioate
  modified_base 2: mod_base = OTHER; note = 2'-fluoroadenosine-3'-phosphorothioate
  modified_base 3: mod_base = OTHER; note = 2'-O-methylguanosine-3'-phosphate
  modified_base 4: mod_base = OTHER; note = 2'-O-methyladenosine-3'-phosphate
  modified_base 5: mod_base = OTHER; note = 2'-O-methyladenosine-3'-phosphate
  modified_base 6: mod_base = OTHER; note = 2'-fluorouridine-3'-phosphate
  modified_base 7: mod_base = OTHER; note = 2'-O-methyladenosine-3'-phosphate
  modified_base 8: mod_base = OTHER; note = 2'-fluoroguanosine-3'-phosphate
  modified_base 9: mod_base = OTHER; note = 2'-fluoroadenosine-3'-phosphate
  modified_base 10: mod_base = OTHER; note = 2'-O-methylguanosine-3'-phosphate
  modified_base 11: mod_base = OTHER; note = 2'-O-methyluridine-3'-phosphate
  modified_base 12: mod_base = OTHER; note = 2'-O-methylcytidine-3'-phosphate
  modified_base 13: mod_base = OTHER; note = 2'-O-methylcytidine-3'-phosphate
  modified_base 14: mod_base = OTHER; note = 2'-fluorouridine-3'-phosphate
  modified_base 15: mod_base = OTHER; note = 2'-O-methylcytidine-3'-phosphate
  modified_base 16: mod_base = OTHER; note = 2'-fluoroadenosine-3'-phosphate
  modified_base 17: mod_base = OTHER; note = 2'-O-methyluridine-3'-phosphate
  modified_base 18: mod_base = OTHER; note = 2'-O-methylguanosine-3'-phosphate
  modified_base 19: mod_base = OTHER; note = 2'-O-methyluridine-3'-phosphate
  modified_base 20: mod_base = OTHER; note = 2'-O-methyladenosine-3'-phosphate
  modified_base 21: mod_base = OTHER; note = 2'-O-methyladenosine-3'-phosphorothioate
  modified_base 22: mod_base = OTHER; note = 2'-O-methyladenosine-3'-phosphorothioate
  modified_base 23: mod_base = OTHER; note = 2'-O-methylguanosine-3'-phosphate
aagaatagagtcctcatgtaaag

SEQ ID NO: 319 - RNA, 23 nt, synthetic construct
  misc_feature 1..23: note = Description of Artificial Sequence: Synthetic oligonucleotide
  source 1..23: mol_type = other RNA
  modified_base 1: mod_base = OTHER; note = 2'-O-methyluridine-3'-phosphorothioate
  modified_base 2: mod_base = OTHER; note = 2'-fluoroguanosine-3'-phosphorothioate
  modified_base 3: mod_base = OTHER; note = 2'-O-methyladenosine-3'-phosphate
  modified_base 4: mod_base = OTHER; note = 2'-O-methyladenosine-3'-phosphate
  modified_base 5: mod_base = OTHER; note = 2'-O-methyladenosine-3'-phosphate
  modified_base 6: mod_base = OTHER; note = 2'-fluoroadenosine-3'-phosphate
  modified_base 7: mod_base = OTHER; note = 2'-O-methylguanosine-3'-phosphate
  modified_base 8: mod_base = OTHER; note = 2'-fluoroadenosine-3'-phosphate
  modified_base 9: mod_base = OTHER; note = 2'-fluorocytidine-3'-phosphate
  modified_base 10: mod_base = OTHER; note = 2'-O-methyladenosine-3'-phosphate
  modified_base 11: mod_base = OTHER; note = 2'-O-methyluridine-3'-phosphate
  modified_base 12: mod_base = OTHER; note = 2'-O-methylcytidine-3'-phosphate
  modified_base 13: mod_base = OTHER; note = 2'-O-methyluridine-3'-phosphate
  modified_base 14: mod_base = OTHER; note = 2'-fluoroadenosine-3'-phosphate
  modified_base 15: mod_base = OTHER; note = 2'-O-methyluridine-3'-phosphate
  modified_base 16: mod_base = OTHER; note = 2'-fluoroadenosine-3'-phosphate
  modified_base 17: mod_base = OTHER; note = 2'-O-methylguanosine-3'-phosphate
  modified_base 18: mod_base = OTHER; note = 2'-O-methylcytidine-3'-phosphate
  modified_base 19: mod_base = OTHER; note = 2'-O-methylcytidine-3'-phosphate
  modified_base 20: mod_base = OTHER; note = 2'-O-methyladenosine-3'-phosphate
  modified_base 21: mod_base = OTHER; note = 2'-O-methylguanosine-3'-phosphorothioate
  modified_base 22: mod_base = OTHER; note = 2'-O-methylcytidine-3'-phosphorothioate
  modified_base 23: mod_base = OTHER; note = 2'-O-methyladenosine-3'-phosphate
tgaaaagacatctatagccagca

SEQ ID NO: 320 - RNA, 23 nt, synthetic construct
  misc_feature 1..23: note = Description of Artificial Sequence: Synthetic oligonucleotide
  source 1..23: mol_type = other RNA
  modified_base 1: mod_base = OTHER; note = 2'-O-methyladenosine-3'-phosphorothioate
  modified_base 2: mod_base = OTHER; note = 2'-fluoroadenosine-3'-phosphorothioate
  modified_base 3: mod_base = OTHER; note = 2'-O-methylguanosine-3'-phosphate
  modified_base 4: mod_base = OTHER; note = 2'-O-methyladenosine-3'-phosphate
  modified_base 5: mod_base = OTHER; note = 2'-O-methyladenosine-3'-phosphate
  modified_base 6: mod_base = OTHER; note = 2'-fluoroadenosine-3'-phosphate
  modified_base 7: mod_base = OTHER; note = 2'-O-methyladenosine-3'-phosphate
  modified_base 8: mod_base = OTHER; note = 2'-fluorocytidine-3'-phosphate
  modified_base 9: mod_base = OTHER; note = 2'-fluoroguanosine-3'-phosphate
  modified_base 10: mod_base = OTHER; note = 2'-O-methyladenosine-3'-phosphate
  modified_base 11: mod_base = OTHER; note = 2'-O-methyluridine-3'-phosphate
  modified_base 12: mod_base = OTHER; note = 2'-O-methyladenosine-3'-phosphate
  modified_base 13: mod_base = OTHER; note = 2'-O-methyladenosine-3'-phosphate
  modified_base 14: mod_base = OTHER; note = 2'-fluorouridine-3'-phosphate
  modified_base 15: mod_base = OTHER; note = 2'-O-methylcytidine-3'-phosphate
  modified_base 16: mod_base = OTHER; note = 2'-fluorouridine-3'-phosphate
  modified_base 17: mod_base = OTHER; note = 2'-O-methylcytidine-3'-phosphate
  modified_base 18: mod_base = OTHER; note = 2'-O-methylguanosine-3'-phosphate
  modified_base 19: mod_base = OTHER; note = 2'-O-methyladenosine-3'-phosphate
  modified_base 20: mod_base = OTHER; note = 2'-O-methyladenosine-3'-phosphate
  modified_base 21: mod_base = OTHER; note = 2'-O-methyladenosine-3'-phosphorothioate
  modified_base 22: mod_base = OTHER; note = 2'-O-methyladenosine-3'-phosphorothioate
  modified_base 23: mod_base = OTHER; note = 2'-O-methylcytidine-3'-phosphate
aagaaaacgataatctcgaaaac

SEQ ID NO: 321 - RNA, 23 nt, synthetic construct
  misc_feature 1..23: note = Description of Artificial Sequence: Synthetic oligonucleotide
  source 1..23: mol_type = other RNA
  modified_base 1: mod_base = OTHER; note = 2'-O-methyladenosine-3'-phosphorothioate
  modified_base 2: mod_base = OTHER; note = 2'-fluoroadenosine-3'-phosphorothioate
  modified_base 3: mod_base = OTHER; note = 2'-O-methylguanosine-3'-phosphate
  modified_base 4: mod_base = OTHER; note = 2'-O-methylcytidine-3'-phosphate
  modified_base 5: mod_base = OTHER; note = 2'-O-methylguanosine-3'-phosphate
  modified_base 6: mod_base = OTHER; note = 2'-fluorouridine-3'-phosphate
  modified_base 7: mod_base = OTHER; note = 2'-O-methylguanosine-3'-phosphate
  modified_base 8: mod_base = OTHER; note = 2'-fluorouridine-3'-phosphate
  modified_base 9: mod_base = OTHER; note = 2'-fluoroadenosine-3'-phosphate
  modified_base 10: mod_base = OTHER; note = 2'-O-methyladenosine-3'-phosphate
  modified_base 11: mod_base = OTHER; note = 2'-O-methyladenosine-3'-phosphate
  modified_base 12: mod_base = OTHER; note = 2'-O-methyladenosine-3'-phosphate
  modified_base 13: mod_base = OTHER; note = 2'-O-methyluridine-3'-phosphate
  modified_base 14: mod_base = OTHER; note = 2'-fluorouridine-3'-phosphate
  modified_base 15: mod_base = OTHER; note = 2'-O-methyladenosine-3'-phosphate
  modified_base 16: mod_base = OTHER; note = 2'-fluorocytidine-3'-phosphate
  modified_base 17: mod_base = OTHER; note = 2'-O-methyladenosine-3'-phosphate
  modified_base 18: mod_base = OTHER; note = 2'-O-methyladenosine-3'-phosphate
  modified_base 19: mod_base = OTHER; note = 2'-O-methylguanosine-3'-phosphate
  modified_base 20: mod_base = OTHER; note = 2'-O-methyladenosine-3'-phosphate
  modified_base 21: mod_base = OTHER; note = 2'-O-methyladenosine-3'-phosphorothioate
  modified_base 22: mod_base = OTHER; note = 2'-O-methylcytidine-3'-phosphorothioate
  modified_base 23: mod_base = OTHER; note = 2'-O-methylguanosine-3'-phosphate
aagcgtgtaaaattacaagaacg

SEQ ID NO: 322 - RNA, 23 nt, synthetic construct
  misc_feature 1..23: note = Description of Artificial Sequence: Synthetic oligonucleotide
  source 1..23: mol_type = other RNA
  modified_base 1: mod_base = OTHER; note = 2'-O-methyladenosine-3'-phosphorothioate
  modified_base 2: mod_base = OTHER; note = 2'-fluorocytidine-3'-phosphorothioate
  modified_base 3: mod_base = OTHER; note = 2'-O-methyladenosine-3'-phosphate
  modified_base 4: mod_base = OTHER; note = 2'-O-methyluridine-3'-phosphate
  modified_base 5: mod_base = OTHER; note = 2'-O-methyluridine-3'-phosphate
  modified_base 6: mod_base = OTHER; note = 2'-fluorocytidine-3'-phosphate
  modified_base 7: mod_base = OTHER; note = 2'-O-methylguanosine-3'-phosphate
  modified_base 8: mod_base = OTHER; note = 2'-fluoroguanosine-3'-phosphate
  modified_base 9: mod_base = OTHER; note = 2'-fluorouridine-3'-phosphate
  modified_base 10: mod_base = OTHER; note = 2'-O-methyladenosine-3'-phosphate
  modified_base 11: mod_base = OTHER; note = 2'-O-methylguanosine-3'-phosphate
  modified_base 12: mod_base = OTHER; note = 2'-O-methyluridine-3'-phosphate
  modified_base 13: mod_base = OTHER; note = 2'-O-methylguanosine-3'-phosphate
  modified_base 14: mod_base = OTHER; note = 2'-fluorouridine-3'-phosphate
  modified_base 15: mod_base = OTHER; note = 2'-O-methylguanosine-3'-phosphate
  modified_base 16: mod_base = OTHER; note = 2'-fluorouridine-3'-phosphate
  modified_base 17: mod_base = OTHER; note = 2'-O-methyluridine-3'-phosphate
  modified_base 18: mod_base = OTHER; note = 2'-O-methyladenosine-3'-phosphate
  modified_base 19: mod_base = OTHER; note = 2'-O-methyladenosine-3'-phosphate
  modified_base 20: mod_base = OTHER; note = 2'-O-methylcytidine-3'-phosphate
  modified_base 21: mod_base = OTHER; note = 2'-O-methyluridine-3'-phosphorothioate
  modified_base 22: mod_base = OTHER; note = 2'-O-methyladenosine-3'-phosphorothioate
  modified_base 23: mod_base = OTHER; note = 2'-O-methyluridine-3'-phosphate
acattcggtagtgtgttaactat

SEQ ID NO: 323 - RNA, 23 nt, synthetic construct
  misc_feature 1..23: note = Description of Artificial Sequence: Synthetic oligonucleotide
  source 1..23: mol_type = other RNA
  modified_base 1: mod_base = OTHER; note = 2'-O-methyladenosine-3'-phosphorothioate
  modified_base 2: mod_base = OTHER; note = 2'-fluoroadenosine-3'-phosphorothioate
  modified_base 3: mod_base = OTHER; note = 2'-O-methyladenosine-3'-phosphate
  modified_base 4: mod_base = OTHER; note = 2'-O-methyladenosine-3'-phosphate
  modified_base 5: mod_base = OTHER; note = 2'-O-methylcytidine-3'-phosphate
  modified_base 6: mod_base = OTHER; note = 2'-fluorouridine-3'-phosphate
  modified_base 7: mod_base = OTHER; note = 2'-O-methyladenosine-3'-phosphate
  modified_base 8: mod_base = OTHER; note = 2'-fluorouridine-3'-phosphate
  modified_base 9: mod_base = OTHER; note = 2'-fluorocytidine-3'-phosphate
  modified_base 10: mod_base = OTHER; note = 2'-O-methyluridine-3'-phosphate
  modified_base 11: mod_base = OTHER; note = 2'-O-methylcytidine-3'-phosphate
  modified_base 12: mod_base = OTHER; note = 2'-O-methyladenosine-3'-phosphate
  modified_base 13: mod_base = OTHER; note = 2'-O-methyladenosine-3'-phosphate
  modified_base 14: mod_base = OTHER; note = 2'-fluorocytidine-3'-phosphate
  modified_base 15: mod_base = OTHER; note = 2'-O-methyluridine-3'-phosphate
  modified_base 16: mod_base = OTHER; note = 2'-fluorouridine-3'-phosphate
  modified_base 17: mod_base = OTHER; note = 2'-O-methyladenosine-3'-phosphate
  modified_base 18: mod_base = OTHER; note = 2'-O-methyladenosine-3'-phosphate
  modified_base 19: mod_base = OTHER; note = 2'-O-methylcytidine-3'-phosphate
  modified_base 20: mod_base = OTHER; note = 2'-O-methyluridine-3'-phosphate
  modified_base 21: mod_base = OTHER; note = 2'-O-methyluridine-3'-phosphorothioate
  modified_base 22: mod_base = OTHER; note = 2'-O-methyluridine-3'-phosphorothioate
  modified_base 23: mod_base = OTHER; note = 2'-O-methyladenosine-3'-phosphate
aaaactatctcaacttaacttta

SEQ ID NO: 324 - RNA, 23 nt, synthetic construct
  misc_feature 1..23: note = Description of Artificial Sequence: Synthetic oligonucleotide
  source 1..23: mol_type = other RNA
  modified_base 1: mod_base = OTHER; note = 2'-O-methyluridine-3'-phosphorothioate
  modified_base 2: mod_base = OTHER; note = 2'-fluoroadenosine-3'-phosphorothioate
  modified_base 3: mod_base = OTHER; note = 2'-O-methyluridine-3'-phosphate
  modified_base 4: mod_base = OTHER; note = 2'-O-methyluridine-3'-phosphate
  modified_base 5: mod_base = OTHER; note = 2'-O-methylcytidine-3'-phosphate
  modified_base 6: mod_base = OTHER; note = 2'-fluorouridine-3'-phosphate
  modified_base 7: mod_base = OTHER; note = 2'-O-methyladenosine-3'-phosphate
  modified_base 8: mod_base = OTHER; note = 2'-fluoroadenosine-3'-phosphate
  modified_base 9: mod_base = OTHER; note = 2'-fluorouridine-3'-phosphate
  modified_base 10: mod_base = OTHER; note = 2'-O-methyladenosine-3'-phosphate
  modified_base 11: mod_base = OTHER; note = 2'-O-methyladenosine-3'-phosphate
  modified_base 12: mod_base = OTHER; note = 2'-O-methyluridine-3'-phosphate
  modified_base 13: mod_base = OTHER; note = 2'-O-methylcytidine-3'-phosphate
  modified_base 14: mod_base = OTHER; note = 2'-fluorocytidine-3'-phosphate
  modified_base 15: mod_base = OTHER; note = 2'-O-methylcytidine-3'-phosphate
  modified_base 16: mod_base = OTHER; note = 2'-fluoroadenosine-3'-phosphate
  modified_base 17: mod_base = OTHER; note = 2'-O-methyluridine-3'-phosphate
  modified_base 18: mod_base = OTHER; note = 2'-O-methylguanosine-3'-phosphate
  modified_base 19: mod_base = OTHER; note = 2'-O-methylcytidine-3'-phosphate
  modified_base 20: mod_base = OTHER; note = 2'-O-methyluridine-3'-phosphate
  modified_base 21: mod_base = OTHER; note = 2'-O-methyluridine-3'-phosphorothioate
  modified_base 22: mod_base = OTHER; note = 2'-O-methyluridine-3'-phosphorothioate
  modified_base 23: mod_base = OTHER; note = 2'-O-methylguanosine-3'-phosphate
tattctaataatcccatgctttg

SEQ ID NO: 325 - RNA, 23 nt, synthetic construct
  misc_feature 1..23: note = Description of Artificial Sequence: Synthetic oligonucleotide
  source 1..23: mol_type = other RNA
  modified_base 1: mod_base = OTHER; note = 2'-O-methyladenosine-3'-phosphorothioate
  modified_base 2: mod_base = OTHER; note = 2'-fluoroadenosine-3'-phosphorothioate
  modified_base 3: mod_base = OTHER; note = 2'-O-methyluridine-3'-phosphate
  modified_base 4: mod_base = OTHER; note = 2'-O-methylguanosine-3'-phosphate
  modified_base 5: mod_base = OTHER; note = 2'-O-methylguanosine-3'-phosphate
  modified_base 6: mod_base = OTHER; note = 2'-fluoroguanosine-3'-phosphate
  modified_base 7: mod_base = OTHER; note = 2'-O-methyladenosine-3'-phosphate
  modified_base 8: mod_base = OTHER; note = 2'-fluoroguanosine-3'-phosphate
  modified_base 9: mod_base = OTHER; note = 2'-fluorouridine-3'-phosphate
  modified_base 10: mod_base = OTHER; note = 2'-O-methyluridine-3'-phosphate
  modified_base 11: mod_base = OTHER; note = 2'-O-methyladenosine-3'-phosphate
  modified_base 12: mod_base = OTHER; note = 2'-O-methyladenosine-3'-phosphate
  modified_base 13: mod_base = OTHER; note = 2'-O-methyladenosine-3'-phosphate
  modified_base 14: mod_base = OTHER; note = 2'-fluoroguanosine-3'-phosphate
  modified_base 15: mod_base = OTHER; note = 2'-O-methyladenosine-3'-phosphate
  modified_base 16: mod_base = OTHER; note = 2'-fluoroadenosine-3'-phosphate
  modified_base 17: mod_base = OTHER; note = 2'-O-methyluridine-3'-phosphate
  modified_base 18: mod_base = OTHER; note = 2'-O-methyladenosine-3'-phosphate
  modified_base 19: mod_base = OTHER; note = 2'-O-methylguanosine-3'-phosphate
  modified_base 20: mod_base = OTHER; note = 2'-O-methyladenosine-3'-phosphate
  modified_base 21: mod_base = OTHER; note = 2'-O-methylguanosine-3'-phosphorothioate
  modified_base 22: mod_base = OTHER; note = 2'-O-methyluridine-3'-phosphorothioate
  modified_base 23: mod_base = OTHER; note = 2'-O-methylcytidine-3'-phosphate
aatgggagttaaagaatagagtc

SEQ ID NO: 326 - RNA, 23 nt, synthetic construct
  misc_feature 1..23: note = Description of Artificial Sequence: Synthetic oligonucleotide
  source 1..23: mol_type = other RNA
  modified_base 1: mod_base = OTHER; note = 2'-O-methyladenosine-3'-phosphorothioate
  modified_base 2: mod_base = OTHER; note = 2'-fluoroadenosine-3'-phosphorothioate
  modified_base 3: mod_base = OTHER; note = 2'-O-methyladenosine-3'-phosphate
  modified_base 4: mod_base = OTHER; note = 2'-O-methylguanosine-3'-phosphate
  modified_base 5: mod_base = OTHER; note = 2'-O-methylcytidine-3'-phosphate
  modified_base 6: mod_base = OTHER; note = 2'-fluoroguanosine-3'-phosphate
  modified_base 7: mod_base = OTHER; note = 2'-O-methyluridine-3'-phosphate
  modified_base 8: mod_base = OTHER; note = 2'-fluoroguanosine-3'-phosphate
  modified_base 9: mod_base = OTHER; note = 2'-fluorouridine-3'-phosphate
  modified_base 10: mod_base = OTHER; note = 2'-O-methyladenosine-3'-phosphate
  modified_base 11: mod_base = OTHER; note = 2'-O-methyladenosine-3'-phosphate
  modified_base 12: mod_base = OTHER; note = 2'-O-methyladenosine-3'-phosphate
  modified_base 13: mod_base = OTHER; note = 2'-O-methyladenosine-3'-phosphate
  modified_base 14: mod_base = OTHER; note = 2'-fluorouridine-3'-phosphate
  modified_base 15: mod_base = OTHER; note = 2'-O-methyluridine-3'-phosphate
  modified_base 16: mod_base = OTHER; note = 2'-fluoroadenosine-3'-phosphate
  modified_base 17: mod_base = OTHER; note = 2'-O-methylcytidine-3'-phosphate
  modified_base 18: mod_base = OTHER; note = 2'-O-methyladenosine-3'-phosphate
  modified_base 19: mod_base = OTHER; note = 2'-O-methyladenosine-3'-phosphate
  modified_base 20: mod_base = OTHER; note = 2'-O-methylguanosine-3'-phosphate
  modified_base 21: mod_base = OTHER; note = 2'-O-methyladenosine-3'-phosphorothioate
  modified_base 22: mod_base = OTHER; note = 2'-O-methyladenosine-3'-phosphorothioate
  modified_base 23: mod_base = OTHER; note = 2'-O-methylcytidine-3'-phosphate
aaagcgtgtaaaattacaagaac

SEQ ID NO: 327 - RNA, 23 nt, synthetic construct
  misc_feature 1..23: note = Description of Artificial Sequence: Synthetic oligonucleotide
  source 1..23: mol_type = other RNA
  modified_base 1: mod_base = OTHER; note = 2'-O-methyluridine-3'-phosphorothioate
  modified_base 2: mod_base = OTHER; note = 2'-fluoroadenosine-3'-phosphorothioate
  modified_base 3: mod_base = OTHER; note = 2'-O-methyluridine-3'-phosphate
  modified_base 4: mod_base = OTHER; note = 2'-O-methyluridine-3'-phosphate
  modified_base 5: mod_base = OTHER; note = 2'-O-methylcytidine-3'-phosphate
  modified_base 6: mod_base = OTHER; note = 2'-fluoroguanosine-3'-phosphate
  modified_base 7: mod_base = OTHER; note = 2'-O-methylguanosine-3'-phosphate
  modified_base 8: mod_base = OTHER; note = 2'-fluorouridine-3'-phosphate
  modified_base 9: mod_base = OTHER; note = 2'-fluoroadenosine-3'-phosphate
  modified_base 10: mod_base = OTHER; note = 2'-O-methylguanosine-3'-phosphate
  modified_base 11: mod_base = OTHER; note = 2'-O-methyluridine-3'-phosphate
  modified_base 12: mod_base = OTHER; note = 2'-O-methylguanosine-3'-phosphate
  modified_base 13: mod_base = OTHER; note = 2'-O-methyluridine-3'-phosphate
  modified_base 14: mod_base = OTHER; note = 2'-fluoroguanosine-3'-phosphate
  modified_base 15: mod_base = OTHER; note = 2'-O-methyluridine-3'-phosphate
  modified_base 16: mod_base = OTHER; note = 2'-fluorouridine-3'-phosphate
  modified_base 17: mod_base = OTHER; note = 2'-O-methyladenosine-3'-phosphate
  modified_base 18: mod_base = OTHER; note = 2'-O-methyladenosine-3'-phosphate
  modified_base 19: mod_base = OTHER; note = 2'-O-methylcytidine-3'-phosphate
  modified_base 20: mod_base = OTHER; note = 2'-O-methyluridine-3'-phosphate
  modified_base 21: mod_base = OTHER; note = 2'-O-methyladenosine-3'-phosphorothioate
  modified_base 22: mod_base = OTHER; note = 2'-O-methyluridine-3'-phosphorothioate
  modified_base 23: mod_base = OTHER; note = 2'-O-methyladenosine-3'-phosphate
tattcggtagtgtgttaactata

SEQ ID NO: 328 - RNA, 23 nt, synthetic construct
  misc_feature 1..23: note = Description of Artificial Sequence: Synthetic oligonucleotide
  source 1..23: mol_type = other RNA
  modified_base 1: mod_base = OTHER; note = 2'-O-methyluridine-3'-phosphorothioate
  modified_base 2: mod_base = OTHER; note = 2'-fluoroadenosine-3'-phosphorothioate
  modified_base 3: mod_base = OTHER; note = 2'-O-methylcytidine-3'-phosphate
  modified_base 4: mod_base = OTHER; note = 2'-O-methyladenosine-3'-phosphate
  modified_base 5: mod_base = OTHER; note = 2'-O-methyluridine-3'-phosphate
  modified_base 6: mod_base = OTHER; note = 2'-fluorouridine-3'-phosphate
  modified_base 7: mod_base = OTHER; note = 2'-O-methylcytidine-3'-phosphate
  modified_base 8: mod_base = OTHER; note = 2'-fluoroguanosine-3'-phosphate
  modified_base 9: mod_base = OTHER; note = 2'-fluoroguanosine-3'-phosphate
  modified_base 10: mod_base = OTHER; note = 2'-O-methyluridine-3'-phosphate
  modified_base 11: mod_base = OTHER; note = 2'-O-methyladenosine-3'-phosphate
  modified_base 12: mod_base = OTHER; note = 2'-O-methylguanosine-3'-phosphate
  modified_base 13: mod_base = OTHER; note = 2'-O-methyluridine-3'-phosphate
  modified_base 14: mod_base = OTHER; note = 2'-fluoroguanosine-3'-phosphate
  modified_base 15: mod_base = OTHER; note = 2'-O-methyluridine-3'-phosphate
  modified_base 16: mod_base = OTHER; note = 2'-fluoroguanosine-3'-phosphate
  modified_base 17: mod_base = OTHER; note = 2'-O-methyluridine-3'-phosphate
  modified_base 18: mod_base = OTHER; note = 2'-O-methyluridine-3'-phosphate
  modified_base 19: mod_base = OTHER; note = 2'-O-methyladenosine-3'-phosphate
  modified_base 20: mod_base = OTHER; note = 2'-O-methyladenosine-3'-phosphate
  modified_base 21: mod_base = OTHER; note = 2'-O-methylcytidine-3'-phosphorothioate
  modified_base 22: mod_base = OTHER; note = 2'-O-methyluridine-3'-phosphorothioate
  modified_base 23: mod_base = OTHER; note = 2'-O-methyladenosine-3'-phosphate
tacattcggtagtgtgttaacta

SEQ ID NO: 329 - RNA, 23 nt, synthetic construct
  misc_feature 1..23: note = Description of Artificial Sequence: Synthetic oligonucleotide
  source 1..23: mol_type = other RNA
  modified_base 1: mod_base = OTHER; note = 2'-O-methyluridine-3'-phosphorothioate
  modified_base 2: mod_base = OTHER; note = 2'-fluorouridine-3'-phosphorothioate
  modified_base 3: mod_base = OTHER; note = 2'-O-methylcytidine-3'-phosphate
  modified_base 4: mod_base = OTHER; note = 2'-O-methylguanosine-3'-phosphate
  modified_base 5: mod_base = OTHER; note = 2'-O-methyluridine-3'-phosphate
  modified_base 6: mod_base = OTHER; note = 2'-fluoroadenosine-3'-phosphate
  modified_base 7: mod_base = OTHER; note = 2'-O-methyluridine-3'-phosphate
  modified_base 8: mod_base = OTHER; note = 2'-fluoroadenosine-3'-phosphate
  modified_base 9: mod_base = OTHER; note = 2'-fluoroadenosine-3'-phosphate
  modified_base 10: mod_base = OTHER; note = 2'-O-methylguanosine-3'-phosphate
  modified_base 11: mod_base = OTHER; note = 2'-O-methylcytidine-3'-phosphate
  modified_base 12: mod_base = OTHER; note = 2'-O-methyluridine-3'-phosphate
  modified_base 13: mod_base = OTHER; note = 2'-O-methylguanosine-3'-phosphate
  modified_base 14: mod_base = OTHER; note = 2'-fluorocytidine-3'-phosphate
  modified_base 15: mod_base = OTHER; note = 2'-O-methyladenosine-3'-phosphate
  modified_base 16: mod_base = OTHER; note = 2'-fluorouridine-3'-phosphate
  modified_base 17: mod_base = OTHER; note = 2'-O-methylcytidine-3'-phosphate
  modified_base 18: mod_base = OTHER; note = 2'-O-methyladenosine-3'-phosphate
  modified_base 19: mod_base = OTHER; note = 2'-O-methylguanosine-3'-phosphate
  modified_base 20: mod_base = OTHER; note = 2'-O-methyladenosine-3'-phosphate
  modified_base 21: mod_base = OTHER; note = 2'-O-methylguanosine-3'-phosphorothioate
  modified_base 22: mod_base = OTHER; note = 2'-O-methyladenosine-3'-phosphorothioate
  modified_base 23: mod_base = OTHER; note = 2'-O-methylcytidine-3'-phosphate
ttcgtataagctgcatcagagac

SEQ ID NO: 330 - RNA, 23 nt, synthetic construct
  misc_feature 1..23: note = Description of Artificial Sequence: Synthetic oligonucleotide
  source 1..23: mol_type = other RNA
  modified_base 1: mod_base = OTHER; note = 2'-O-methyluridine-3'-phosphorothioate
  modified_base 2: mod_base = OTHER; note = 2'-fluoroadenosine-3'-phosphorothioate
  modified_base 3: mod_base = OTHER; note = 2'-O-methyluridine-3'-phosphate
  modified_base 4: mod_base = OTHER; note = 2'-O-methylguanosine-3'-phosphate
  modified_base 5: mod_base = OTHER; note = 2'-O-methylcytidine-3'-phosphate
  modified_base 6: mod_base = OTHER; note = 2'-fluoroadenosine-3'-phosphate
  modified_base 7: mod_base = OTHER; note = 2'-O-methylguanosine-3'-phosphate
  modified_base 8: mod_base = OTHER; note = 2'-fluoroguanosine-3'-phosphate
  modified_base 9: mod_base = OTHER; note = 2'-fluoroguanosine-3'-phosphate
  modified_base 10: mod_base = OTHER; note = 2'-O-methyluridine-3'-phosphate
  modified_base 11: mod_base = OTHER; note = 2'-O-methylguanosine-3'-phosphate
  modified_base 12: mod_base = OTHER; note = 2'-O-methyluridine-3'-phosphate
  modified_base 13: mod_base = OTHER; note = 2'-O-methylguanosine-3'-phosphate
  modified_base 14: mod_base = OTHER; note = 2'-fluorouridine-3'-phosphate
  modified_base 15: mod_base = OTHER; note = 2'-O-methyladenosine-3'-phosphate
  modified_base 16: mod_base = OTHER; note = 2'-fluoroguanosine-3'-phosphate
  modified_base 17: mod_base = OTHER; note = 2'-O-methyladenosine-3'-phosphate
  modified_base 18: mod_base = OTHER; note = 2'-O-methylcytidine-3'-phosphate
  modified_base 19: mod_base = OTHER; note = 2'-O-methyladenosine-3'-phosphate
  modified_base 20: mod_base = OTHER; note = 2'-O-methyladenosine-3'-phosphate
  modified_base 21: mod_base = OTHER; note = 2'-O-methyladenosine-3'-phosphorothioate
  modified_base 22: mod_base = OTHER; note = 2'-O-methyladenosine-3'-phosphorothioate
  modified_base 23: mod_base = OTHER; note = 2'-O-methylguanosine-3'-phosphate
tatgcagggtgtgtagacaaaag

SEQ ID NO: 331 - RNA, 23 nt, synthetic construct
  misc_feature 1..23: note = Description of Artificial Sequence: Synthetic oligonucleotide
  source 1..23: mol_type = other RNA
  modified_base 1: mod_base = OTHER; note = 2'-O-methyladenosine-3'-phosphorothioate
  modified_base 2: mod_base = OTHER; note = 2'-fluoroguanosine-3'-phosphorothioate
  modified_base 3: mod_base = OTHER; note = 2'-O-methyluridine-3'-phosphate
  modified_base 4: mod_base = OTHER; note = 2'-O-methyluridine-3'-phosphate
  modified_base 5: mod_base = OTHER; note = 2'-O-methyladenosine-3'-phosphate
  modified_base 6: mod_base = OTHER; note = 2'-fluorouridine-3'-phosphate
  modified_base 7: mod_base = OTHER; note = 2'-O-methylguanosine-3'-phosphate
  modified_base 8: mod_base = OTHER; note = 2'-fluoroguanosine-3'-phosphate
  modified_base 9: mod_base = OTHER; note = 2'-fluoroadenosine-3'-phosphate
  modified_base 10: mod_base = OTHER; note = 2'-O-methyluridine-3'-phosphate
  modified_base 11: mod_base = OTHER; note = 2'-O-methylguanosine-3'-phosphate
  modified_base 12: mod_base = OTHER; note = 2'-O-methyladenosine-3'-phosphate
  modified_base 13: mod_base = OTHER; note = 2'-O-methyladenosine-3'-phosphate
  modified_base 14: mod_base = OTHER; note = 2'-fluoroadenosine-3'-phosphate
  modified_base 15: mod_base = OTHER; note = 2'-O-methyladenosine-3'-phosphate
  modified_base 16: mod_base = OTHER; note = 2'-fluorocytidine-3'-phosphate
  modified_base 17: mod_base = OTHER; note = 2'-O-methyluridine-3'-phosphate
  modified_base 18: mod_base = OTHER; note = 2'-O-methyladenosine-3'-phosphate
  modified_base 19: mod_base = OTHER; note = 2'-O-methyluridine-3'-phosphate
  modified_base 20: mod_base = OTHER; note = 2'-O-methylcytidine-3'-phosphate
  modified_base 21: mod_base = OTHER; note = 2'-O-methyluridine-3'-phosphorothioate
  modified_base 22: mod_base = OTHER; note = 2'-O-methylcytidine-3'-phosphorothioate
  modified_base 23: mod_base = OTHER; note = 2'-O-methyladenosine-3'-phosphate
agttatggatgaaaactatctca

SEQ ID NO: 332 - RNA, 23 nt, synthetic construct
  misc_feature 1..23: note = Description of Artificial Sequence: Synthetic oligonucleotide
  source 1..23: mol_type = other RNA
  modified_base 1: mod_base = OTHER; note = 2'-O-methyladenosine-3'-phosphorothioate
  modified_base 2: mod_base = OTHER; note = 2'-fluoroadenosine-3'-phosphorothioate
  modified_base 3: mod_base = OTHER; note = 2'-O-methyluridine-3'-phosphate
  modified_base 4: mod_base = OTHER; note = 2'-O-methyladenosine-3'-phosphate
  modified_base 5: mod_base = OTHER; note = 2'-O-methyladenosine-3'-phosphate
  modified_base 6: mod_base = OTHER; note = 2'-fluorouridine-3'-phosphate
  modified_base 7: mod_base = OTHER; note = 2'-O-methylcytidine-3'-phosphate
  modified_base 8: mod_base = OTHER; note = 2'-fluorocytidine-3'-phosphate
  modified_base 9: mod_base = OTHER; note = 2'-fluorocytidine-3'-phosphate
  modified_base 10: mod_base = OTHER; note = 2'-O-methyladenosine-3'-phosphate
  modified_base 11: mod_base = OTHER; note = 2'-O-methyluridine-3'-phosphate
  modified_base 12: mod_base = OTHER; note = 2'-O-methylguanosine-3'-phosphate
  modified_base 13: mod_base = OTHER; note = 2'-O-methylcytidine-3'-phosphate
  modified_base 14: mod_base = OTHER; note = 2'-fluorouridine-3'-phosphate
  modified_base 15: mod_base = OTHER; note = 2'-O-methyluridine-3'-phosphate
  modified_base 16: mod_base = OTHER; note = 2'-fluorouridine-3'-phosphate
  modified_base 17: mod_base = OTHER; note = 2'-O-methylguanosine-3'-phosphate
  modified_base 18: mod_base = OTHER; note = 2'-O-methyladenosine-3'-phosphate
  modified_base 19: mod_base = OTHER; note = 2'-O-methylguanosine-3'-phosphate
  modified_base 20: mod_base = OTHER; note = 2'-O-methyluridine-3'-phosphate
  modified_base 21: mod_base = OTHER; note = 2'-O-methyladenosine-3'-phosphorothioate
  modified_base 22: mod_base = OTHER; note = 2'-O-methylguanosine-3'-phosphorothioate
  modified_base 23: mod_base = OTHER; note = 2'-O-methyladenosine-3'-phosphate
aataatcccatgctttgagtaga

SEQ ID NO: 333 - RNA, 23 nt, synthetic construct
  misc_feature 1..23: note = Description of Artificial Sequence: Synthetic oligonucleotide
  source 1..23: mol_type = other RNA
  modified_base 1: mod_base = OTHER; note = 2'-O-methyluridine-3'-phosphorothioate
  modified_base 2: mod_base = OTHER; note = 2'-fluorouridine-3'-phosphorothioate
  modified_base 3: mod_base = OTHER; note = 2'-O-methyladenosine-3'-phosphate
  modified_base 4: mod_base = OTHER; note = 2'-O-methylcytidine-3'-phosphate
  modified_base 5: mod_base = OTHER; note = 2'-O-methyladenosine-3'-phosphate
  modified_base 6: mod_base = OTHER; note = 2'-fluorouridine-3'-phosphate
  modified_base 7: mod_base = OTHER; note = 2'-O-methylguanosine-3'-phosphate
  modified_base 8: mod_base = OTHER; note = 2'-fluoroguanosine-3'-phosphate
  modified_base 9: mod_base = OTHER; note = 2'-fluorouridine-3'-phosphate
  modified_base 10: mod_base = OTHER; note = 2'-O-methyladenosine-3'-phosphate
  modified_base 11: mod_base = OTHER; note = 2'-O-methyladenosine-3'-phosphate
  modified_base 12: mod_base = OTHER; note = 2'-O-methyluridine-3'-phosphate
  modified_base 13: mod_base = OTHER; note = 2'-O-methylguanosine-3'-phosphate
  modified_base 14: mod_base = OTHER; note = 2'-fluoroguanosine-3'-phosphate
  modified_base 15: mod_base = OTHER; note = 2'-O-methylguanosine-3'-phosphate
  modified_base 16: mod_base = OTHER; note = 2'-fluoroadenosine-3'-phosphate
  modified_base 17: mod_base = OTHER; note = 2'-O-methylguanosine-3'-phosphate
  modified_base 18: mod_base = OTHER; note = 2'-O-methyluridine-3'-phosphate
  modified_base 19: mod_base = OTHER; note = 2'-O-methyluridine-3'-phosphate
  modified_base 20: mod_base = OTHER; note = 2'-O-methyladenosine-3'-phosphate
  modified_base 21: mod_base = OTHER; note = 2'-O-methyladenosine-3'-phosphorothioate
  modified_base 22: mod_base = OTHER; note = 2'-O-methyladenosine-3'-phosphorothioate
  modified_base 23: mod_base = OTHER; note = 2'-O-methylguanosine-3'-phosphate
ttacatggtaatgggagttaaag

SEQ ID NO: 334 - RNA, 23 nt, synthetic construct
  misc_feature 1..23: note = Description of Artificial Sequence: Synthetic oligonucleotide
  source 1..23: mol_type = other RNA
  modified_base 1: mod_base = OTHER; note = 2'-O-methyladenosine-3'-phosphorothioate
  modified_base 2: mod_base = OTHER; note = 2'-fluorouridine-3'-phosphorothioate
  modified_base 3: mod_base = OTHER; note = 2'-O-methyluridine-3'-phosphate
  modified_base 4: mod_base = OTHER; note = 2'-O-methyladenosine-3'-phosphate
  modified_base 5: mod_base = OTHER; note = 2'-O-methylcytidine-3'-phosphate
  modified_base 6: mod_base = OTHER; note = 2'-fluoroadenosine-3'-phosphate
  modified_base 7: mod_base = OTHER; note = 2'-O-methyluridine-3'-phosphate
  modified_base 8: mod_base = OTHER; note = 2'-fluoroguanosine-3'-phosphate
  modified_base 9: mod_base = OTHER; note = 2'-fluoroguanosine-3'-phosphate
  modified_base 10: mod_base = OTHER; note = 2'-O-methyluridine-3'-phosphate
  modified_base 11: mod_base = OTHER; note = 2'-O-methyladenosine-3'-phosphate
  modified_base 12: mod_base = OTHER; note = 2'-O-methyladenosine-3'-phosphate
  modified_base 13: mod_base = OTHER; note = 2'-O-methyluridine-3'-phosphate
  modified_base 14: mod_base = OTHER; note = 2'-fluoroguanosine-3'-phosphate
  modified_base 15: mod_base = OTHER; note = 2'-O-methylguanosine-3'-phosphate
  modified_base 16: mod_base = OTHER; note = 2'-fluoroguanosine-3'-phosphate
  modified_base 17: mod_base = OTHER; note = 2'-O-methyladenosine-3'-phosphate
  modified_base 18: mod_base = OTHER; note = 2'-O-methylguanosine-3'-phosphate
  modified_base 19: mod_base = OTHER; note = 2'-O-methyluridine-3'-phosphate
  modified_base 20: mod_base = OTHER; note = 2'-O-methyluridine-3'-phosphate
  modified_base 21: mod_base = OTHER; note = 2'-O-methyladenosine-3'-phosphorothioate
  modified_base 22: mod_base = OTHER; note = 2'-O-methyladenosine-3'-phosphorothioate
  modified_base 23: mod_base = OTHER; note = 2'-O-methyladenosine-3'-phosphate
attacatggtaatgggagttaaa

SEQ ID NO: 335 - RNA, 23 nt, synthetic construct
  misc_feature 1..23: note = Description of Artificial Sequence: Synthetic oligonucleotide
  source 1..23: mol_type = other RNA
  modified_base 1: mod_base = OTHER; note = 2'-O-methyluridine-3'-phosphorothioate
  modified_base 2: mod_base = OTHER; note = 2'-fluoroguanosine-3'-phosphorothioate
  modified_base 3: mod_base = OTHER; note = 2'-O-methyluridine-3'-phosphate
  modified_base 4: mod_base = OTHER; note = 2'-O-methyladenosine-3'-phosphate
  modified_base 5: mod_base = OTHER; note = 2'-O-methyluridine-3'-phosphate
  modified_base 6: mod_base = OTHER; note = 2'-fluorouridine-3'-phosphate
  modified_base 7: mod_base = OTHER; note = 2'-O-methyluridine-3'-phosphate
  modified_base 8: mod_base = OTHER; note = 2'-fluorouridine-3'-phosphate
  modified_base 9: mod_base = OTHER; note = 2'-fluoroadenosine-3'-phosphate
  modified_base 10: mod_base = OTHER; note = 2'-O-methyladenosine-3'-phosphate
  modified_base 11: mod_base = OTHER; note = 2'-O-methylguanosine-3'-phosphate
  modified_base 12: mod_base = OTHER; note = 2'-O-methylcytidine-3'-phosphate
  modified_base 13: mod_base = OTHER; note = 2'-O-methyluridine-3'-phosphate
  modified_base 14: mod_base = OTHER; note = 2'-fluorocytidine-3'-phosphate
  modified_base 15: mod_base = OTHER; note = 2'-O-methyladenosine-3'-phosphate
  modified_base 16: mod_base = OTHER; note = 2'-fluorocytidine-3'-phosphate
  modified_base 17: mod_base = OTHER; note = 2'-O-methylguanosine-3'-phosphate
  modified_base 18: mod_base = OTHER; note = 2'-O-methylcytidine-3'-phosphate
  modified_base 19: mod_base = OTHER; note = 2'-O-methyluridine-3'-phosphate
  modified_base 20: mod_base = OTHER; note = 2'-O-methyluridine-3'-phosphate
  modified_base 21: mod_base = OTHER; note = 2'-O-methyluridine-3'-phosphorothioate
  modified_base 22: mod_base = OTHER; note = 2'-O-methyluridine-3'-phosphorothioate
  modified_base 23: mod_base = OTHER; note = 2'-O-methylguanosine-3'-phosphate
tgtattttaagctcacgcttttg

SEQ ID NO: 336 - RNA, 23 nt, synthetic construct
  misc_feature 1..23: note = Description of Artificial Sequence: Synthetic oligonucleotide
  source 1..23: mol_type = other RNA
  modified_base 1: mod_base = OTHER; note = 2'-O-methyluridine-3'-phosphorothioate
  modified_base 2: mod_base = OTHER; note = 2'-fluoroadenosine-3'-phosphorothioate
  modified_base 3: mod_base = OTHER; note = 2'-O-methylcytidine-3'-phosphate
  modified_base 4: mod_base = OTHER; note = 2'-O-methyluridine-3'-phosphate
  modified_base 5: mod_base = OTHER; note = 2'-O-methylguanosine-3'-phosphate
  modified_base 6: mod_base = OTHER; note = 2'-fluoroadenosine-3'-phosphate
  modified_base 7: mod_base = OTHER; note = 2'-O-methylguanosine-3'-phosphate
  modified_base 8: mod_base = OTHER; note = 2'-fluoroadenosine-3'-phosphate
  modified_base 9: mod_base = OTHER; note = 2'-fluorocytidine-3'-phosphate
  modified_base 10: mod_base = OTHER; note = 2'-O-methyluridine-3'-phosphate
  modified_base 11: mod_base = OTHER; note = 2'-O-methyladenosine-3'-phosphate
  modified_base 12: mod_base = OTHER; note = 2'-O-methyladenosine-3'-phosphate
  modified_base 13: mod_base = OTHER; note = 2'-O-methyluridine-3'-phosphate
  modified_base 14: mod_base = OTHER; note = 2'-fluoroguanosine-3'-phosphate
  modified_base 15: mod_base = OTHER; note = 2'-O-methyluridine-3'-phosphate
  modified_base 16: mod_base = OTHER; note = 2'-fluorocytidine-3'-phosphate
  modified_base 17: mod_base = OTHER; note = 2'-O-methyladenosine-3'-phosphate
  modified_base 18: mod_base = OTHER; note = 2'-O-methyladenosine-3'-phosphate
  modified_base 19: mod_base = OTHER; note = 2'-O-methylcytidine-3'-phosphate
  modified_base 20: mod_base = OTHER; note = 2'-O-methyladenosine-3'-phosphate
  modified_base 21: mod_base = OTHER; note = 2'-O-methyladenosine-3'-phosphorothioate
  modified_base 22: mod_base = OTHER; note = 2'-O-methyladenosine-3'-phosphorothioate
  modified_base 23: mod_base = OTHER; note = 2'-O-methyladenosine-3'-phosphate
tactgagactaatgtcaacaaaa

SEQ ID NO: 337 - RNA, 23 nt, synthetic construct
  misc_feature 1..23: note = Description of Artificial Sequence: Synthetic oligonucleotide
  source 1..23: mol_type = other RNA
  modified_base 1: mod_base = OTHER; note = 2'-O-methyladenosine-3'-phosphorothioate
  modified_base 2: mod_base = OTHER; note = 2'-fluorouridine-3'-phosphorothioate
  modified_base 3: mod_base = OTHER; note = 2'-O-methyladenosine-3'-phosphate
  modified_base 4: mod_base = OTHER; note = 2'-O-methyluridine-3'-phosphate
  modified_base 5: mod_base = OTHER; note = 2'-O-methylguanosine-3'-phosphate
  modified_base 6: mod_base = OTHER; note = 2'-fluorocytidine-3'-phosphate
  modified_base 7: mod_base = OTHER; note = 2'-O-methyladenosine-3'-phosphate
  modified_base 8: mod_base = OTHER; note = 2'-fluoroguanosine-3'-phosphate
  modified_base 9: mod_base = OTHER; note = 2'-fluoroguanosine-3'-phosphate
  modified_base 10: mod_base = OTHER; note = 2'-O-methylguanosine-3'-phosphate
  modified_base 11: mod_base = OTHER; note = 2'-O-methyluridine-3'-phosphate
  modified_base 12: mod_base = OTHER; note = 2'-O-methylguanosine-3'-phosphate
  modified_base 13: mod_base = OTHER; note = 2'-O-methyluridine-3'-phosphate
  modified_base 14: mod_base = OTHER; note = 2'-fluoroguanosine-3'-phosphate
  modified_base 15: mod_base = OTHER; note = 2'-O-methyluridine-3'-phosphate
  modified_base 16: mod_base = OTHER; note = 2'-fluoroadenosine-3'-phosphate
  modified_base 17: mod_base = OTHER; note = 2'-O-methylguanosine-3'-phosphate
  modified_base 18: mod_base = OTHER; note = 2'-O-methyladenosine-3'-phosphate
  modified_base 19: mod_base = OTHER; note = 2'-O-methylcytidine-3'-phosphate
  modified_base 20: mod_base = OTHER; note = 2'-O-methyladenosine-3'-phosphate
  modified_base 21: mod_base = OTHER; note = 2'-O-methyladenosine-3'-phosphorothioate
  modified_base 22: mod_base = OTHER; note = 2'-O-methyladenosine-3'-phosphorothioate
  modified_base 23: mod_base = OTHER; note = 2'-O-methyladenosine-3'-phosphate
atatgcagggtgtgtagacaaaa

SEQ ID NO: 338 - RNA, 23 nt, synthetic construct
  misc_feature 1..23: note = Description of Artificial Sequence: Synthetic oligonucleotide
  source 1..23: mol_type = other RNA
  modified_base 1: mod_base = OTHER; note = 2'-O-methylguanosine-3'-phosphorothioate
  modified_base 2: mod_base = OTHER; note = 2'-fluorouridine-3'-phosphorothioate
  modified_base 3: mod_base = OTHER; note = 2'-O-methyluridine-3'-phosphate
  modified_base 4: mod_base = OTHER; note = 2'-O-methyluridine-3'-phosphate
  modified_base 5: mod_base = OTHER; note = 2'-O-methylguanosine-3'-phosphate
  modified_base 6: mod_base = OTHER; note = 2'-fluorouridine-3'-phosphate
  modified_base 7: mod_base = OTHER; note = 2'-O-methyladenosine-3'-phosphate
  modified_base 8: mod_base = OTHER; note = 2'-fluoroadenosine-3'-phosphate
  modified_base 9: mod_base = OTHER; note = 2'-fluoroadenosine-3'-phosphate
  modified_base 10: mod_base = OTHER; note = 2'-O-methyluridine-3'-phosphate
  modified_base 11: mod_base = OTHER; note = 2'-O-methylguanosine-3'-phosphate
  modified_base 12: mod_base = OTHER; note = 2'-O-methyluridine-3'-phosphate
  modified_base 13: mod_base = OTHER; note = 2'-O-methyladenosine-3'-phosphate
  modified_base 14: mod_base = OTHER; note = 2'-fluoroadenosine-3'-phosphate
  modified_base 15: mod_base = OTHER; note = 2'-O-methylguanosine-3'-phosphate
  modified_base 16: mod_base = OTHER; note = 2'-fluorouridine-3'-phosphate
  modified_base 17: mod_base = OTHER; note = 2'-O-methylguanosine-3'-phosphate
  modified_base 18: mod_base = OTHER; note = 2'-O-methylguanosine-3'-phosphate
  modified_base 19: mod_base = OTHER; note = 2'-O-methylguanosine-3'-phosphate
  modified_base 20: mod_base = OTHER; note = 2'-O-methylcytidine-3'-phosphate
  modified_base 21: mod_base = OTHER; note = 2'-O-methyluridine-3'-phosphorothioate
  modified_base 22: mod_base = OTHER; note = 2'-O-methyladenosine-3'-phosphorothioate
  modified_base 23: mod_base = OTHER; note = 2'-O-methyluridine-3'-phosphate
gtttgtaaatgtaagtgggctat

SEQ ID NO: 339 - RNA, 23 nt, synthetic construct
  misc_feature 1..23: note = Description of Artificial Sequence: Synthetic oligonucleotide
  source 1..23: mol_type = other RNA
  modified_base 1: mod_base = OTHER; note = 2'-O-methyluridine-3'-phosphorothioate
  modified_base 2: mod_base = OTHER; note = 2'-fluorouridine-3'-phosphorothioate
  modified_base 3: mod_base = OTHER; note = 2'-O-methylcytidine-3'-phosphate
  modified_base 4: mod_base = OTHER; note = 2'-O-methylcytidine-3'-phosphate
  modified_base 5: mod_base = OTHER; note = 2'-O-methyluridine-3'-phosphate
  modified_base 6: mod_base = OTHER; note = 2'-fluorocytidine-3'-phosphate
  modified_base 7: mod_base = OTHER; note = 2'-O-methyladenosine-3'-phosphate
  modified_base 8: mod_base = OTHER; note = 2'-fluorouridine-3'-phosphate
  modified_base 9: mod_base = OTHER; note = 2'-fluoroguanosine-3'-phosphate
  modified_base 10: mod_base = OTHER; note = 2'-O-methyluridine-3'-phosphate
  modified_base 11: mod_base = OTHER; note = 2'-O-methyladenosine-3'-phosphate
  modified_base 12: mod_base = OTHER; note = 2'-O-methyladenosine-3'-phosphate
  modified_base 13: mod_base = OTHER; note = 2'-O-methyladenosine-3'-phosphate
  modified_base 14: mod_base = OTHER; note = 2'-fluoroguanosine-3'-phosphate
  modified_base 15: mod_base = OTHER; note = 2'-O-methylguanosine-3'-phosphate
  modified_base 16: mod_base = OTHER; note = 2'-fluorouridine-3'-phosphate
  modified_base 17: mod_base = OTHER; note = 2'-O-methyluridine-3'-phosphate
  modified_base 18: mod_base = OTHER; note = 2'-O-methyladenosine-3'-phosphate
  modified_base 19: mod_base = OTHER; note = 2'-O-methylguanosine-3'-phosphate
  modified_base 20: mod_base = OTHER; note = 2'-O-methyladenosine-3'-phosphate
  modified_base 21: mod_base = OTHER; note = 2'-O-methyladenosine-3'-phosphorothioate
  modified_base 22: mod_base = OTHER; note = 2'-O-methylcytidine-3'-phosphorothioate
  modified_base 23: mod_base = OTHER; note = 2'-O-methyladenosine-3'-phosphate
ttcctcatgtaaaggttagaaca

SEQ ID NO: 340 - RNA, 23 nt, synthetic construct
  misc_feature 1..23: note = Description of Artificial Sequence: Synthetic oligonucleotide
  source 1..23: mol_type = other RNA
  modified_base 1: mod_base = OTHER; note = 2'-O-methyladenosine-3'-phosphorothioate
  modified_base 2: mod_base = OTHER; note = 2'-fluorouridine-3'-phosphorothioate
  modified_base 3: mod_base = OTHER; note = 2'-O-methyladenosine-3'-phosphate
  modified_base 4: mod_base = OTHER; note = 2'-O-methylguanosine-3'-phosphate
  modified_base 5: mod_base = OTHER; note = 2'-O-methyladenosine-3'-phosphate
  modified_base 6: mod_base = OTHER; note = 2'-fluoroguanosine-3'-phosphate
  modified_base 7: mod_base = OTHER; note = 2'-O-methyluridine-3'-phosphate
  modified_base 8: mod_base = OTHER; note = 2'-fluorocytidine-3'-phosphate
  modified_base 9: mod_base = OTHER; note = 2'-fluorocytidine-3'-phosphate
  modified_base 10: mod_base = OTHER; note = 2'-O-methyluridine-3'-phosphate
  modified_base 11: mod_base = OTHER; note = 2'-O-methylcytidine-3'-phosphate
  modified_base 12: mod_base = OTHER; note = 2'-O-methyladenosine-3'-phosphate
  modified_base 13: mod_base = OTHER; note = 2'-O-methyluridine-3'-phosphate
  modified_base 14: mod_base = OTHER; note = 2'-fluoroguanosine-3'-phosphate
  modified_base 15: mod_base = OTHER; note = 2'-O-methyluridine-3'-phosphate
  modified_base 16: mod_base = OTHER; note = 2'-fluoroadenosine-3'-phosphate
  modified_base 17: mod_base = OTHER; note = 2'-O-methyladenosine-3'-phosphate
  modified_base 18: mod_base = OTHER; note = 2'-O-methyladenosine-3'-phosphate
  modified_base 19: mod_base = OTHER; note = 2'-O-methylguanosine-3'-phosphate
  modified_base 20: mod_base = OTHER; note = 2'-O-methylguanosine-3'-phosphate
  modified_base 21: mod_base = OTHER; note = 2'-O-methyluridine-3'-phosphorothioate
  modified_base 22: mod_base = OTHER; note = 2'-O-methyluridine-3'-phosphorothioate
  modified_base 23: mod_base = OTHER; note = 2'-O-methyladenosine-3'-phosphate
atagagtcctcatgtaaaggtta

SEQ ID NO: 341 - RNA, 23 nt, synthetic construct
  misc_feature 1..23: note = Description of Artificial Sequence: Synthetic oligonucleotide
  source 1..23: mol_type = other RNA
  modified_base 1: mod_base = OTHER; note = 2'-O-methyluridine-3'-phosphorothioate
  modified_base 2: mod_base = OTHER; note = 2'-fluoroadenosine-3'-phosphorothioate
  modified_base 3: mod_base = OTHER; note = 2'-O-methylcytidine-3'-phosphate
  modified_base 4: mod_base = OTHER; note = 2'-O-methyladenosine-3'-phosphate
  modified_base 5: mod_base = OTHER; note = 2'-O-methyluridine-3'-phosphate
  modified_base 6: mod_base = OTHER; note = 2'-fluoroguanosine-3'-phosphate
  modified_base 7: mod_base = OTHER; note = 2'-O-methylguanosine-3'-phosphate
  modified_base 8: mod_base = OTHER; note = 2'-fluorouridine-3'-phosphate
  modified_base 9: mod_base = OTHER; note = 2'-fluoroadenosine-3'-phosphate
  modified_base 10: mod_base = OTHER; note = 2'-O-methyladenosine-3'-phosphate
  modified_base 11: mod_base = OTHER; note = 2'-O-methyluridine-3'-phosphate
  modified_base 12: mod_base = OTHER; note = 2'-O-methylguanosine-3'-phosphate
  modified_base 13: mod_base = OTHER; note = 2'-O-methylguanosine-3'-phosphate
  modified_base 14: mod_base = OTHER; note = 2'-fluoroguanosine-3'-phosphate
  modified_base 15: mod_base = OTHER; note = 2'-O-methyladenosine-3'-phosphate
  modified_base 16: mod_base = OTHER; note = 2'-fluoroguanosine-3'-phosphate
  modified_base 17: mod_base = OTHER; note = 2'-O-methyluridine-3'-phosphate
  modified_base 18: mod_base = OTHER; note = 2'-O-methyluridine-3'-phosphate
  modified_base 19: mod_base = OTHER; note = 2'-O-methyladenosine-3'-phosphate
  modified_base 20: mod_base = OTHER; note = 2'-O-methyladenosine-3'-phosphate
  modified_base 21: mod_base = OTHER; note = 2'-O-methyladenosine-3'-phosphorothioate
  modified_base 22: mod_base = OTHER; note = 2'-O-methylguanosine-3'-phosphorothioate
  modified_base 23: mod_base = OTHER; note = 2'-O-methyladenosine-3'-phosphate
tacatggtaatgggagttaaaga

SEQ ID NO: 342 - RNA, 23 nt, synthetic construct
  misc_feature 1..23: note = Description of Artificial Sequence: Synthetic oligonucleotide
  source 1..23: mol_type = other RNA
  modified_base 1: mod_base = OTHER; note = 2'-O-methyluridine-3'-phosphorothioate
  modified_base 2: mod_base = OTHER; note = 2'-fluoroadenosine-3'-phosphorothioate
  modified_base 3: mod_base = OTHER; note = 2'-O-methyladenosine-3'-phosphate
  modified_base 4: mod_base = OTHER; note = 2'-O-methyladenosine-3'-phosphate
  modified_base 5: mod_base = OTHER; note = 2'-O-methylguanosine-3'-phosphate
  modified_base 6: mod_base = OTHER; note = 2'-fluorouridine-3'-phosphate
  modified_base 7: mod_base = OTHER; note = 2'-O-methylcytidine-3'-phosphate
  modified_base 8: mod_base = OTHER; note = 2'-fluorouridine-3'-phosphate
  modified_base 9: mod_base = OTHER; note = 2'-fluorocytidine-3'-phosphate
  modified_base 10: mod_base = OTHER; note = 2'-O-methylguanosine-3'-phosphate
  modified_base 11: mod_base = OTHER; note = 2'-O-methyluridine-3'-phosphate
  modified_base 12: mod_base = OTHER; note = 2'-O-methyluridine-3'-phosphate
  modified_base 13: mod_base = OTHER; note = 2'-O-methyluridine-3'-phosphate
  modified_base 14: mod_base = OTHER; note = 2'-fluorocytidine-3'-phosphate
  modified_base 15: mod_base = OTHER; note = 2'-O-methylcytidine-3'-phosphate
  modified_base 16: mod_base = OTHER; note = 2'-fluorouridine-3'-phosphate
  modified_base 17: mod_base = OTHER; note = 2'-O-methylguanosine-3'-phosphate
  modified_base 18: mod_base = OTHER; note = 2'-O-methyladenosine-3'-phosphate
  modified_base 19: mod_base = OTHER; note = 2'-O-methylguanosine-3'-phosphate
  modified_base 20: mod_base = OTHER; note = 2'-O-methylcytidine-3'-phosphate
  modified_base 21: mod_base = OTHER; note = 2'-O-methyladenosine-3'-phosphorothioate
  modified_base 22: mod_base = OTHER; note = 2'-O-methylguanosine-3'-phosphorothioate
  modified_base 23: mod_base = OTHER; note = 2'-O-methyluridine-3'-phosphate
taaagtctcgtttcctgagcagt

SEQ ID NO: 343 - RNA, 23 nt, synthetic construct
  misc_feature 1..23: note = Description of Artificial Sequence: Synthetic oligonucleotide
  source 1..23: mol_type = other RNA
  modified_base 1: mod_base = OTHER; note = 2'-O-methyladenosine-3'-phosphorothioate
  modified_base 2: mod_base = OTHER; note = 2'-fluorouridine-3'-phosphorothioate
  modified_base 3: mod_base = OTHER; note = 2'-O-methyluridine-3'-phosphate
  modified_base 4: mod_base = OTHER; note = 2'-O-methylcytidine-3'-phosphate
  modified_base 5: mod_base = OTHER; note = 2'-O-methylguanosine-3'-phosphate
  modified_base 6: mod_base = OTHER; note = 2'-fluoroguanosine-3'-phosphate
  modified_base 7: mod_base = OTHER; note = 2'-O-methyluridine-3'-phosphate
  modified_base 8: mod_base = OTHER; note = 2'-fluoroadenosine-3'-phosphate
  modified_base 9: mod_base = OTHER; note = 2'-fluoroguanosine-3'-phosphate
  modified_base 10: mod_base = OTHER; note = 2'-O-methyluridine-3'-phosphate
  modified_base 11: mod_base = OTHER; note = 2'-O-methylguanosine-3'-phosphate
  modified_base 12: mod_base = OTHER; note = 2'-O-methyluridine-3'-phosphate
  modified_base 13: mod_base = OTHER; note = 2'-O-methylguanosine-3'-phosphate
  modified_base 14: mod_base = OTHER; note = 2'-fluorouridine-3'-phosphate
  modified_base 15: mod_base = OTHER; note = 2'-O-methyluridine-3'-phosphate
  modified_base 16: mod_base = OTHER; note = 2'-fluoroadenosine-3'-phosphate
  modified_base 17: mod_base = OTHER; note = 2'-O-methyladenosine-3'-phosphate
  modified_base 18: mod_base = OTHER; note = 2'-O-methylcytidine-3'-phosphate
  modified_base 19: mod_base = OTHER; note = 2'-O-methyluridine-3'-phosphate
  modified_base 20: mod_base = OTHER; note = 2'-O-methyladenosine-3'-phosphate
  modified_base 21: mod_base = OTHER; note = 2'-O-methyluridine-3'-phosphorothioate
  modified_base 22: mod_base = OTHER; note = 2'-O-methyladenosine-3'-phosphorothioate
  modified_base 23: mod_base = OTHER; note = 2'-O-methylcytidine-3'-phosphate
attcggtagtgtgttaactatac

SEQ ID NO: 344 - RNA, 23 nt, synthetic construct
  misc_feature 1..23: note = Description of Artificial Sequence: Synthetic oligonucleotide
  source 1..23: mol_type = other RNA
  modified_base 1: mod_base = OTHER; note = 2'-O-methyluridine-3'-phosphorothioate
  modified_base 2: mod_base = OTHER; note = 2'-fluoroadenosine-3'-phosphorothioate
  modified_base 3: mod_base = OTHER; note = 2'-O-methyluridine-3'-phosphate
  modified_base 4: mod_base = OTHER; note = 2'-O-methyluridine-3'-phosphate
  modified_base 5: mod_base = OTHER; note = 2'-O-methyluridine-3'-phosphate
  modified_base 6: mod_base = OTHER; note = 2'-fluorocytidine-3'-phosphate
  modified_base 7: mod_base = OTHER; note = 2'-O-methylguanosine-3'-phosphate
  modified_base 8: mod_base = OTHER; note = 2'-fluorouridine-3'-phosphate
  modified_base 9: mod_base = OTHER; note = 2'-fluoroadenosine-3'-phosphate
  modified_base 10: mod_base = OTHER; note = 2'-O-methyluridine-3'-phosphate
  modified_base 11: mod_base = OTHER; note = 2'-O-methyladenosine-3'-phosphate
  modified_base 12: mod_base = OTHER; note = 2'-O-methyladenosine-3'-phosphate
  modified_base 13: mod_base = OTHER; note = 2'-O-methylguanosine-3'-phosphate
  modified_base 14: mod_base = OTHER; note = 2'-fluorocytidine-3'-phosphate
  modified_base 15: mod_base = OTHER; note = 2'-O-methyluridine-3'-phosphate
  modified_base 16: mod_base = OTHER; note = 2'-fluoroguanosine-3'-phosphate
  modified_base 17: mod_base = OTHER; note = 2'-O-methylcytidine-3'-phosphate
  modified_base 18: mod_base = OTHER; note = 2'-O-methyladenosine-3'-phosphate
  modified_base 19: mod_base = OTHER; note = 2'-O-methyluridine-3'-phosphate
  modified_base 20: mod_base = OTHER; note = 2'-O-methylcytidine-3'-phosphate
  modified_base 21: mod_base = OTHER; note = 2'-O-methyladenosine-3'-phosphorothioate
  modified_base 22: mod_base = OTHER; note = 2'-O-methylguanosine-3'-phosphorothioate
  modified_base 23: mod_base = OTHER; note = 2'-O-methyladenosine-3'-phosphate
tatttcgtataagctgcatcaga

SEQ ID NO: 345 - RNA, 23 nt, synthetic construct
  misc_feature 1..23: note = Description of Artificial Sequence: Synthetic oligonucleotide
  source 1..23: mol_type = other RNA
  modified_base 1: mod_base = OTHER; note = 2'-O-methyluridine-3'-phosphorothioate
  modified_base 2: mod_base = OTHER; note = 2'-fluoroadenosine-3'-phosphorothioate
  modified_base 3: mod_base = OTHER; note = 2'-O-methyluridine-3'-phosphate
  modified_base 4: mod_base = OTHER; note = 2'-O-methyluridine-3'-phosphate
  modified_base 5: mod_base = OTHER; note = 2'-O-methyladenosine-3'-phosphate
  modified_base 6: mod_base = OTHER; note = 2'-fluoroguanosine-3'-phosphate
  modified_base 7: mod_base = OTHER; note = 2'-O-methyluridine-3'-phosphate
  modified_base 8: mod_base = OTHER; note = 2'-fluorocytidine-3'-phosphate
  modified_base 9: mod_base = OTHER; note = 2'-fluorocytidine-3'-phosphate
  modified_base 10: mod_base = OTHER; note = 2'-O-methyluridine-3'-phosphate
  modified_base 11: mod_base = OTHER; note = 2'-O-methyluridine-3'-phosphate
  modified_base 12: mod_base = OTHER; note = 2'-O-methylcytidine-3'-phosphate
  modified_base 13: mod_base = OTHER; note = 2'-O-methyladenosine-3'-phosphate
  modified_base 14: mod_base = OTHER; note = 2'-fluoroadenosine-3'-phosphate
  modified_base 15: mod_base = OTHER; note = 2'-O-methylguanosine-3'-phosphate
  modified_base 16: mod_base = OTHER; note = 2'-fluoroguanosine-3'-phosphate
  modified_base 17: mod_base = OTHER; note = 2'-O-methyladenosine-3'-phosphate
  modified_base 18: mod_base = OTHER; note = 2'-O-methylcytidine-3'-phosphate
  modified_base 19: mod_base = OTHER; note = 2'-O-methyladenosine-3'-phosphate
  modified_base 20: mod_base = OTHER; note = 2'-O-methylguanosine-3'-phosphate
  modified_base 21: mod_base = OTHER; note = 2'-O-methyladenosine-3'-phosphorothioate
  modified_base 22: mod_base = OTHER; note = 2'-O-methylcytidine-3'-phosphorothioate
  modified_base 23: mod_base = OTHER; note = 2'-O-methyluridine-3'-phosphate
tattagtccttcaaggacagact

SEQ ID NO: 346 - RNA, 23 nt, synthetic construct
  misc_feature 1..23: note = Description of Artificial Sequence: Synthetic oligonucleotide
  source 1..23: mol_type = other RNA
  modified_base 1: mod_base = OTHER; note = 2'-O-methyluridine-3'-phosphorothioate
  modified_base 2: mod_base = OTHER; note = 2'-fluoroguanosine-3'-phosphorothioate
  modified_base 3: mod_base = OTHER; note = 2'-O-methyluridine-3'-phosphate
  modified_base 4: mod_base = OTHER; note = 2'-O-methyladenosine-3'-phosphate
  modified_base 5: mod_base = OTHER; note = 2'-O-methyladenosine-3'-phosphate
  modified_base 6: mod_base = OTHER; note = 2'-fluorouridine-3'-phosphate
  modified_base 7: mod_base = OTHER; note = 2'-O-methylguanosine-3'-phosphate
  modified_base 8: mod_base = OTHER; note = 2'-fluoroguanosine-3'-phosphate
  modified_base 9: mod_base = OTHER; note = 2'-fluoroadenosine-3'-phosphate
  modified_base 10: mod_base = OTHER; note = 2'-O-methyladenosine-3'-phosphate
  modified_base 11: mod_base = OTHER; note = 2'-O-methyladenosine-3'-phosphate
  modified_base 12: mod_base = OTHER; note = 2'-O-methylguanosine-3'-phosphate
  modified_base 13: mod_base = OTHER; note = 2'-O-methyluridine-3'-phosphate
  modified_base 14: mod_base = OTHER; note = 2'-fluorocytidine-3'-phosphate
  modified_base 15: mod_base = OTHER; note = 2'-O-methyluridine-3'-phosphate
  modified_base 16: mod_base = OTHER; note = 2'-fluorocytidine-3'-phosphate
  modified_base 17: mod_base = OTHER; note = 2'-O-methylguanosine-3'-phosphate
  modified_base 18: mod_base = OTHER; note = 2'-O-methyluridine-3'-phosphate
  modified_base 19: mod_base = OTHER; note = 2'-O-methyluridine-3'-phosphate
  modified_base 20: mod_base = OTHER; note = 2'-O-methyluridine-3'-phosphate
  modified_base 21: mod_base = OTHER; note = 2'-O-methylcytidine-3'-phosphorothioate
  modified_base 22: mod_base = OTHER; note = 2'-O-methylcytidine-3'-phosphorothioate
  modified_base 23: mod_base = OTHER; note = 2'-O-methyluridine-3'-phosphate
tgtaatggaaagtctcgtttcct

SEQ ID NO: 347 - RNA, 23 nt, synthetic construct
  misc_feature 1..23: note = Description of Artificial Sequence: Synthetic oligonucleotide
  source 1..23: mol_type = other RNA
  modified_base 1: mod_base = OTHER; note = 2'-O-methyladenosine-3'-phosphorothioate
  modified_base 2: mod_base = OTHER; note = 2'-fluoroguanosine-3'-phosphorothioate
  modified_base 3: mod_base = OTHER; note = 2'-O-methylcytidine-3'-phosphate
  modified_base 4: mod_base = OTHER; note = 2'-O-methylguanosine-3'-phosphate
  modified_base 5: mod_base = OTHER; note = 2'-O-methyluridine-3'-phosphate
  modified_base 6: mod_base = OTHER; note = 2'-fluoroguanosine-3'-phosphate
  modified_base 7: mod_base = OTHER; note = 2'-O-methyluridine-3'-phosphate
  modified_base 8: mod_base = OTHER; note = 2'-fluoroadenosine-3'-phosphate
  modified_base 9: mod_base = OTHER; note = 2'-fluoroadenosine-3'-phosphate
  modified_base 10: mod_base = OTHER; note = 2'-O-methyladenosine-3'-phosphate
  modified_base 11: mod_base = OTHER; note = 2'-O-methyladenosine-3'-phosphate
  modified_base 12: mod_base = OTHER; note = 2'-O-methyluridine-3'-phosphate
  modified_base 13: mod_base = OTHER; note = 2'-O-methyluridine-3'-phosphate
  modified_base 14: mod_base = OTHER; note = 2'-fluoroadenosine-3'-phosphate
  modified_base 15: mod_base = OTHER; note = 2'-O-methylcytidine-3'-phosphate
  modified_base 16: mod_base = OTHER; note = 2'-fluoroadenosine-3'-phosphate
  modified_base 17: mod_base = OTHER; note = 2'-O-methyladenosine-3'-phosphate
  modified_base 18: mod_base = OTHER; note = 2'-O-methylguanosine-3'-phosphate
  modified_base 19: mod_base = OTHER; note = 2'-O-methyladenosine-3'-phosphate
  modified_base 20: mod_base = OTHER; note = 2'-O-methyladenosine-3'-phosphate
  modified_base 21: mod_base = OTHER; note = 2'-O-methylcytidine-3'-phosphorothioate
  modified_base 22: mod_base = OTHER; note = 2'-O-methylguanosine-3'-phosphorothioate
  modified_base 23: mod_base = OTHER; note = 2'-O-methylcytidine-3'-phosphate
agcgtgtaaaattacaagaacgc

SEQ ID NO: 348 - RNA, 23 nt, synthetic construct
  misc_feature 1..23: note = Description of Artificial Sequence: Synthetic oligonucleotide
  source 1..23: mol_type = other RNA
  modified_base 1: mod_base = OTHER; note = 2'-O-methyluridine-3'-phosphorothioate
  modified_base 2: mod_base = OTHER; note = 2'-fluorouridine-3'-phosphorothioate
  modified_base 3: mod_base = OTHER; note = 2'-O-methyladenosine-3'-phosphate
  modified_base 4: mod_base = OTHER; note = 2'-O-methylguanosine-3'-phosphate
  modified_base 5: mod_base = OTHER; note = 2'-O-methylcytidine-3'-phosphate
  modified_base 6: mod_base = OTHER; note = 2'-fluorouridine-3'-phosphate
  modified_base 7: mod_base = OTHER; note = 2'-O-methyladenosine-3'-phosphate
  modified_base 8: mod_base = OTHER; note = 2'-fluoroadenosine-3'-phosphate
  modified_base 9: mod_base = OTHER; note = 2'-fluorocytidine-3'-phosphate
  modified_base 10: mod_base = OTHER; note = 2'-O-methyluridine-3'-phosphate
  modified_base 11: mod_base = OTHER; note = 2'-O-methyladenosine-3'-phosphate
  modified_base 12: mod_base = OTHER; note = 2'-O-methyluridine-3'-phosphate
  modified_base 13: mod_base = OTHER; note = 2'-O-methyladenosine-3'-phosphate
  modified_base 14: mod_base = OTHER; note = 2'-fluorouridine-3'-phosphate
  modified_base 15: mod_base = OTHER; note = 2'-O-methylguanosine-3'-phosphate
  modified_base 16: mod_base = OTHER; note = 2'-fluoroadenosine-3'-phosphate
  modified_base 17: mod_base = OTHER; note = 2'-O-methyladenosine-3'-phosphate
  modified_base 18: mod_base = OTHER; note = 2'-O-methyladenosine-3'-phosphate
  modified_base 19: mod_base = OTHER; note = 2'-O-methylguanosine-3'-phosphate
  modified_base 20: mod_base = OTHER; note = 2'-O-methylguanosine-3'-phosphate
  modified_base 21: mod_base = OTHER; note = 2'-O-methyladenosine-3'-phosphorothioate
  modified_base 22: mod_base = OTHER; note = 2'-O-methyluridine-3'-phosphorothioate
  modified_base 23: mod_base = OTHER; note = 2'-O-methyladenosine-3'-phosphate
ttagctaactatatgaaaggata

SEQ ID NO: 349 - RNA, 23 nt, synthetic construct
  misc_feature 1..23: note = Description of Artificial Sequence: Synthetic oligonucleotide
  source 1..23: mol_type = other RNA
  modified_base 1: mod_base = OTHER; note = 2'-O-methyladenosine-3'-phosphorothioate
  modified_base 2: mod_base = OTHER; note = 2'-fluoroguanosine-3'-phosphorothioate
  modified_base 3: mod_base = OTHER; note = 2'-O-methyluridine-3'-phosphate
  modified_base 4: mod_base = OTHER; note = 2'-O-methylcytidine-3'-phosphate
  modified_base 5: mod_base = OTHER; note = 2'-O-methylcytidine-3'-phosphate
  modified_base 6: mod_base = OTHER; note = 2'-fluorouridine-3'-phosphate
  modified_base 7: mod_base = OTHER; note = 2'-O-methyluridine-3'-phosphate
  modified_base 8: mod_base = OTHER; note = 2'-fluorocytidine-3'-phosphate
  modified_base 9: mod_base = OTHER; note = 2'-fluoroadenosine-3'-phosphate
  modified_base 10: mod_base = OTHER; note = 2'-O-methyladenosine-3'-phosphate
  modified_base 11: mod_base = OTHER; note = 2'-O-methylguanosine-3'-phosphate
  modified_base 12: mod_base = OTHER; note = 2'-O-methylguanosine-3'-phosphate
  modified_base 13: mod_base = OTHER; note = 2'-O-methyladenosine-3'-phosphate
  modified_base 14: mod_base = OTHER; note = 2'-fluorocytidine-3'-phosphate
  modified_base 15: mod_base = OTHER; note = 2'-O-methyladenosine-3'-phosphate
  modified_base 16: mod_base = OTHER; note = 2'-fluoroguanosine-3'-phosphate
  modified_base 17: mod_base = OTHER; note = 2'-O-methyladenosine-3'-phosphate
  modified_base 18: mod_base = OTHER; note = 2'-O-methylcytidine-3'-phosphate
  modified_base 19: mod_base = OTHER; note = 2'-O-methyluridine-3'-phosphate
  modified_base 20: mod_base = OTHER; note = 2'-O-methyluridine-3'-phosphate
  modified_base 21: mod_base = OTHER; note = 2'-O-methyluridine-3'-phosphorothioate
  modified_base 22: mod_base = OTHER; note = 2'-O-methylcytidine-3'-phosphorothioate
  modified_base 23: mod_base = OTHER; note = 2'-O-methyladenosine-3'-phosphate
agtccttcaaggacagactttca

SEQ ID NO: 350 - RNA, 23 nt, synthetic construct
  misc_feature 1..23: note = Description of Artificial Sequence: Synthetic oligonucleotide
  source 1..23: mol_type = other RNA
  modified_base 1: mod_base = OTHER; note = 2'-O-methyluridine-3'-phosphorothioate
  modified_base 2: mod_base = OTHER; note = 2'-fluorouridine-3'-phosphorothioate
  modified_base 3: mod_base = OTHER; note = 2'-O-methylcytidine-3'-phosphate
  modified_base 4: mod_base = OTHER; note = 2'-O-methyluridine-3'-phosphate
  modified_base 5: mod_base = OTHER; note = 2'-O-methyladenosine-3'-phosphate
  modified_base 6: mod_base = OTHER; note = 2'-fluorouridine-3'-phosphate
  modified_base 7: mod_base = OTHER; note = 2'-O-methyluridine-3'-phosphate
  modified_base 8: mod_base = OTHER; note = 2'-fluoroadenosine-3'-phosphate
  modified_base 9: mod_base = OTHER; note = 2'-fluoroguanosine-3'-phosphate
  modified_base 10: mod_base = OTHER; note = 2'-O-methyluridine-3'-phosphate
  modified_base 11: mod_base = OTHER; note = 2'-O-methylcytidine-3'-phosphate
  modified_base 12: mod_base = OTHER; note = 2'-O-methylcytidine-3'-phosphate
  modified_base 13: mod_base = OTHER; note = 2'-O-methyluridine-3'-phosphate
  modified_base 14: mod_base = OTHER; note = 2'-fluorouridine-3'-phosphate
  modified_base 15: mod_base = OTHER; note = 2'-O-methylcytidine-3'-phosphate
  modified_base 16: mod_base = OTHER; note = 2'-fluoroadenosine-3'-phosphate
  modified_base 17: mod_base = OTHER; note = 2'-O-methyladenosine-3'-phosphate
  modified_base 18: mod_base = OTHER; note = 2'-O-methylguanosine-3'-phosphate
  modified_base 19: mod_base = OTHER; note = 2'-O-methylguanosine-3'-phosphate
  modified_base 20: mod_base = OTHER; note = 2'-O-methyladenosine-3'-phosphate
  modified_base 21: mod_base = OTHER; note = 2'-O-methylcytidine-3'-phosphorothioate
  modified_base 22: mod_base = OTHER; note = 2'-O-methyladenosine-3'-phosphorothioate
  modified_base 23: mod_base = OTHER; note = 2'-O-methylguanosine-3'-phosphate
ttctattagtccttcaaggacag

SEQ ID NO: 351 - RNA, 23 nt, synthetic construct
  misc_feature 1..23: note = Description of Artificial Sequence: Synthetic oligonucleotide
  source 1..23: mol_type = other RNA
  modified_base 1: mod_base = OTHER; note = 2'-O-methyluridine-3'-phosphorothioate
  modified_base 2: mod_base = OTHER; note = 2'-fluorocytidine-3'-phosphorothioate
  modified_base 3: mod_base = OTHER; note = 2'-O-methylguanosine-3'-phosphate
  modified_base 4: mod_base = OTHER; note = 2'-O-methyluridine-3'-phosphate
  modified_base 5: mod_base = OTHER; note = 2'-O-methylguanosine-3'-phosphate
  modified_base 6: mod_base = OTHER; note = 2'-fluorouridine-3'-phosphate
  modified_base 7: mod_base = OTHER; note = 2'-O-methyladenosine-3'-phosphate
  modified_base 8: mod_base = OTHER; note = 2'-fluoroadenosine-3'-phosphate
  modified_base 9: mod_base = OTHER; note = 2'-fluoroadenosine-3'-phosphate
  modified_base 10: mod_base = OTHER; note = 2'-O-methyladenosine-3'-phosphate
  modified_base 11: mod_base = OTHER; note = 2'-O-methyluridine-3'-phosphate
  modified_base 12: mod_base = OTHER; note = 2'-O-methyluridine-3'-phosphate
  modified_base 13: mod_base = OTHER; note = 2'-O-methyladenosine-3'-phosphate
  modified_base 14: mod_base = OTHER; note = 2'-fluorocytidine-3'-phosphate
  modified_base 15: mod_base = OTHER; note = 2'-O-methyladenosine-3'-phosphate
  modified_base 16: mod_base = OTHER; note = 2'-fluoroadenosine-3'-phosphate
  modified_base 17: mod_base = OTHER; note = 2'-O-methylguanosine-3'-phosphate
  modified_base 18: mod_base = OTHER; note = 2'-O-methyladenosine-3'-phosphate
  modified_base 19: mod_base = OTHER; note = 2'-O-methyladenosine-3'-phosphate
  modified_base 20: mod_base = OTHER; note = 2'-O-methylcytidine-3'-phosphate
  modified_base 21: mod_base = OTHER; note = 2'-O-methylguanosine-3'-phosphorothioate
  modified_base 22: mod_base = OTHER; note = 2'-O-methylcytidine-3'-phosphorothioate
  modified_base 23: mod_base = OTHER; note = 2'-O-methyluridine-3'-phosphate
tcgtgtaaaattacaagaacgct

SEQ ID NO: 352 - RNA, 23 nt, synthetic construct
  misc_feature 1..23: note = Description of Artificial Sequence: Synthetic oligonucleotide
  source 1..23: mol_type = other RNA
  modified_base 1: mod_base = OTHER; note = 2'-O-methyluridine-3'-phosphorothioate
  modified_base 2: mod_base = OTHER; note = 2'-fluoroguanosine-3'-phosphorothioate
  modified_base 3: mod_base = OTHER; note = 2'-O-methylguanosine-3'-phosphate
  modified_base 4: mod_base = OTHER; note = 2'-O-methyluridine-3'-phosphate
  modified_base 5: mod_base = OTHER; note = 2'-O-methyladenosine-3'-phosphate
  modified_base 6: mod_base = OTHER; note = 2'-fluoroguanosine-3'-phosphate
  modified_base 7: mod_base = OTHER; note = 2'-O-methyluridine-3'-phosphate
  modified_base 8: mod_base = OTHER; note = 2'-fluoroguanosine-3'-phosphate
  modified_base 9: mod_base = OTHER; note = 2'-fluorouridine-3'-phosphate
  modified_base 10: mod_base = OTHER; note = 2'-O-methylguanosine-3'-phosphate
  modified_base 11: mod_base = OTHER; note = 2'-O-methyluridine-3'-phosphate
  modified_base 12: mod_base = OTHER; note = 2'-O-methyluridine-3'-phosphate
  modified_base 13: mod_base = OTHER; note = 2'-O-methyladenosine-3'-phosphate
  modified_base 14: mod_base = OTHER; note = 2'-fluoroadenosine-3'-phosphate
  modified_base 15: mod_base = OTHER; note = 2'-O-methylcytidine-3'-phosphate
  modified_base 16: mod_base = OTHER; note = 2'-fluorouridine-3'-phosphate
  modified_base 17: mod_base = OTHER; note = 2'-O-methyladenosine-3'-phosphate
  modified_base 18: mod_base = OTHER; note = 2'-O-methyluridine-3'-phosphate
  modified_base 19: mod_base = OTHER; note = 2'-O-methyladenosine-3'-phosphate
  modified_base 20: mod_base = OTHER; note = 2'-O-methylcytidine-3'-phosphate
  modified_base 21: mod_base = OTHER; note = 2'-O-methyladenosine-3'-phosphorothioate
  modified_base 22: mod_base = OTHER; note = 2'-O-methyladenosine-3'-phosphorothioate
  modified_base 23: mod_base = OTHER; note = 2'-O-methyladenosine-3'-phosphate
tggtagtgtgttaactatacaaa

SEQ ID NO: 353 - RNA, 23 nt, synthetic construct
  misc_feature 1..23: note = Description of Artificial Sequence: Synthetic oligonucleotide
  source 1..23: mol_type = other RNA
  modified_base 1: mod_base = OTHER; note = 2'-O-methyluridine-3'-phosphorothioate
  modified_base 2: mod_base = OTHER; note = 2'-fluoroguanosine-3'-phosphorothioate
  modified_base 3: mod_base = OTHER; note = 2'-O-methyladenosine-3'-phosphate
  modified_base 4: mod_base = OTHER; note = 2'-O-methylguanosine-3'-phosphate
  modified_base 5: mod_base = OTHER; note = 2'-O-methyluridine-3'-phosphate
  modified_base 6: mod_base = OTHER; note = 2'-fluorouridine-3'-phosphate
  modified_base 7: mod_base = OTHER; note = 2'-O-methyladenosine-3'-phosphate
  modified_base 8: mod_base = OTHER; note = 2'-fluoroadenosine-3'-phosphate
  modified_base 9: mod_base = OTHER; note = 2'-fluoroadenosine-3'-phosphate
  modified_base 10: mod_base = OTHER; note = 2'-O-methylguanosine-3'-phosphate
  modified_base 11: mod_base = OTHER; note = 2'-O-methyladenosine-3'-phosphate
  modified_base 12: mod_base = OTHER; note = 2'-O-methyladenosine-3'-phosphate
  modified_base 13: mod_base = OTHER; note = 2'-O-methyluridine-3'-phosphate
  modified_base 14: mod_base = OTHER; note = 2'-fluoroadenosine-3'-phosphate
  modified_base 15: mod_base = OTHER; note = 2'-O-methylguanosine-3'-phosphate
  modified_base 16: mod_base = OTHER; note = 2'-fluoroadenosine-3'-phosphate
  modified_base 17: mod_base = OTHER; note = 2'-O-methylguanosine-3'-phosphate
  modified_base 18: mod_base = OTHER; note = 2'-O-methyluridine-3'-phosphate
  modified_base 19: mod_base = OTHER; note = 2'-O-methylcytidine-3'-phosphate
  modified_base 20: mod_base = OTHER; note = 2'-O-methylcytidine-3'-phosphate
  modified_base 21: mod_base = OTHER; note = 2'-O-methyluridine-3'-phosphorothioate
  modified_base 22: mod_base = OTHER; note = 2'-O-methylcytidine-3'-phosphorothioate
  modified_base 23: mod_base = OTHER; note = 2'-O-methyladenosine-3'-phosphate
tgagttaaagaatagagtcctca

SEQ ID NO: 354 - RNA, 23 nt, synthetic construct
  misc_feature 1..23: note = Description of Artificial Sequence: Synthetic oligonucleotide
  source 1..23: mol_type = other RNA
  modified_base 1: mod_base = OTHER; note = 2'-O-methyladenosine-3'-phosphorothioate
  modified_base 2: mod_base = OTHER; note = 2'-fluorocytidine-3'-phosphorothioate
  modified_base 3: mod_base = OTHER; note = 2'-O-methyladenosine-3'-phosphate
  modified_base 4: mod_base = OTHER; note = 2'-O-methyladenosine-3'-phosphate
  modified_base 5: mod_base = OTHER; note = 2'-O-methyladenosine-3'-phosphate
  modified_base 6: mod_base = OTHER; note = 2'-fluoroadenosine-3'-phosphate
  modified_base 7: mod_base = OTHER; note = 2'-O-methylguanosine-3'-phosphate
  modified_base 8: mod_base = OTHER; note = 2'-fluorocytidine-3'-phosphate
  modified_base 9: mod_base = OTHER; note = 2'-fluoroguanosine-3'-phosphate
  modified_base 10: mod_base = OTHER; note = 2'-O-methyluridine-3'-phosphate
  modified_base 11: mod_base = OTHER; note = 2'-O-methylguanosine-3'-phosphate
  modified_base 12: mod_base = OTHER; note = 2'-O-methyluridine-3'-phosphate
  modified_base 13: mod_base = OTHER; note = 2'-O-methyladenosine-3'-phosphate
  modified_base 14: mod_base = OTHER; note = 2'-fluoroadenosine-3'-phosphate
  modified_base 15: mod_base = OTHER; note = 2'-O-methyladenosine-3'-phosphate
  modified_base 16: mod_base = OTHER; note = 2'-fluoroadenosine-3'-phosphate
  modified_base 17: mod_base = OTHER; note = 2'-O-methyluridine-3'-phosphate
  modified_base 18: mod_base = OTHER; note = 2'-O-methyluridine-3'-phosphate
  modified_base 19: mod_base = OTHER; note = 2'-O-methyladenosine-3'-phosphate
  modified_base 20: mod_base = OTHER; note = 2'-O-methylcytidine-3'-phosphate
  modified_base 21: mod_base = OTHER; note = 2'-O-methyladenosine-3'-phosphorothioate
  modified_base 22: mod_base = OTHER; note = 2'-O-methyladenosine-3'-phosphorothioate
  modified_base 23: mod_base = OTHER; note = 2'-O-methylguanosine-3'-phosphate
acaaaagcgtgtaaaattacaag

SEQ ID NO: 355 - RNA, 23 nt, synthetic construct
  misc_feature 1..23: note = Description of Artificial Sequence: Synthetic oligonucleotide
  source 1..23: mol_type = other RNA
  modified_base 1: mod_base = OTHER; note = 2'-O-methyluridine-3'-phosphorothioate
  modified_base 2: mod_base = OTHER; note = 2'-fluorouridine-3'-phosphorothioate
  modified_base 3: mod_base = OTHER; note = 2'-O-methyladenosine-3'-phosphate
  modified_base 4: mod_base = OTHER; note = 2'-O-methyluridine-3'-phosphate
  modified_base 5: mod_base = OTHER; note = 2'-O-methyluridine-3'-phosphate
  modified_base 6: mod_base = OTHER; note = 2'-fluoroadenosine-3'-phosphate
  modified_base 7: mod_base = OTHER; note = 2'-O-methylguanosine-3'-phosphate
  modified_base 8: mod_base = OTHER; note = 2'-fluorouridine-3'-phosphate
  modified_base 9: mod_base = OTHER; note = 2'-fluoroadenosine-3'-phosphate
  modified_base 10: mod_base = OTHER; note = 2'-O-methyluridine-3'-phosphate
  modified_base 11: mod_base = OTHER; note = 2'-O-methylcytidine-3'-phosphate
  modified_base 12: mod_base = OTHER; note = 2'-O-methyladenosine-3'-phosphate
  modified_base 13: mod_base = OTHER; note = 2'-O-methyluridine-3'-phosphate
  modified_base 14: mod_base = OTHER; note = 2'-fluorocytidine-3'-phosphate
  modified_base 15: mod_base = OTHER; note = 2'-O-methylcytidine-3'-phosphate
  modified_base 16: mod_base = OTHER; note = 2'-fluoroadenosine-3'-phosphate
  modified_base 17: mod_base = OTHER; note = 2'-O-methylguanosine-3'-phosphate
  modified_base 18: mod_base = OTHER; note = 2'-O-methylguanosine-3'-phosphate
  modified_base 19: mod_base = OTHER; note = 2'-O-methyladenosine-3'-phosphate
  modified_base 20: mod_base = OTHER; note = 2'-O-methylcytidine-3'-phosphate
  modified_base 21: mod_base = OTHER; note = 2'-O-methyluridine-3'-phosphorothioate
  modified_base 22: mod_base = OTHER; note = 2'-O-methylcytidine-3'-phosphorothioate
  modified_base 23: mod_base = OTHER; note = 2'-O-methyladenosine-3'-phosphate
ttattagtatcatccaggactca

SEQ ID NO: 356 - RNA, 23 nt, synthetic construct
  misc_feature 1..23: note = Description of Artificial Sequence: Synthetic oligonucleotide
  source 1..23: mol_type = other RNA
  modified_base 1: mod_base = OTHER; note = 2'-O-methyluridine-3'-phosphorothioate
  modified_base 2: mod_base = OTHER; note = 2'-fluorouridine-3'-phosphorothioate
  modified_base 3: mod_base = OTHER; note = 2'-O-methylcytidine-3'-phosphate
  modified_base 4: mod_base = OTHER; note = 2'-O-methylguanosine-3'-phosphate
  modified_base 5: mod_base = OTHER; note = 2'-O-methylguanosine-3'-phosphate
  modified_base 6: mod_base = OTHER; note = 2'-fluorouridine-3'-phosphate
  modified_base 7: mod_base = OTHER; note = 2'-O-methyladenosine-3'-phosphate
  modified_base 8: mod_base = OTHER; note = 2'-fluoroguanosine-3'-phosphate
  modified_base 9: mod_base = OTHER; note = 2'-fluorouridine-3'-phosphate
  modified_base 10: mod_base = OTHER; note = 2'-O-methylguanosine-3'-phosphate
  modified_base 11: mod_base = OTHER; note = 2'-O-methyluridine-3'-phosphate
  modified_base 12: mod_base = OTHER; note = 2'-O-methylguanosine-3'-phosphate
  modified_base 13: mod_base = OTHER; note = 2'-O-methyluridine-3'-phosphate
  modified_base 14: mod_base = OTHER; note = 2'-fluorouridine-3'-phosphate
  modified_base 15: mod_base = OTHER; note = 2'-O-methyladenosine-3'-phosphate
  modified_base 16: mod_base = OTHER; note = 2'-fluoroadenosine-3'-phosphate
  modified_base 17: mod_base = OTHER; note = 2'-O-methylcytidine-3'-phosphate
  modified_base 18: mod_base = OTHER; note = 2'-O-methyluridine-3'-phosphate
  modified_base 19: mod_base = OTHER; note = 2'-O-methyladenosine-3'-phosphate
  modified_base 20: mod_base = OTHER; note = 2'-O-methyluridine-3'-phosphate
  modified_base 21: mod_base = OTHER; note = 2'-O-methyladenosine-3'-phosphorothioate
  modified_base 22: mod_base = OTHER; note = 2'-O-methylcytidine-3'-phosphorothioate
  modified_base 23: mod_base = OTHER; note = 2'-O-methyladenosine-3'-phosphate
ttcggtagtgtgttaactataca

SEQ ID NO: 357 - RNA, 23 nt, synthetic construct
  misc_feature 1..23: note = Description of Artificial Sequence: Synthetic oligonucleotide
  source 1..23: mol_type = other RNA
  modified_base 1: mod_base = OTHER; note = 2'-O-methyluridine-3'-phosphorothioate
  modified_base 2: mod_base = OTHER; note = 2'-fluorouridine-3'-phosphorothioate
  modified_base 3: mod_base = OTHER; note = 2'-O-methylcytidine-3'-phosphate
  modified_base 4: mod_base = OTHER; note = 2'-O-methyluridine-3'-phosphate
  modified_base 5: mod_base = OTHER; note = 2'-O-methyluridine-3'-phosphate
  modified_base 6: mod_base = OTHER; note = 2'-fluoroadenosine-3'-phosphate
  modified_base 7: mod_base = OTHER; note = 2'-O-methyladenosine-3'-phosphate
  modified_base 8: mod_base = OTHER; note = 2'-fluorocytidine-3'-phosphate
  modified_base 9: mod_base = OTHER; note = 2'-fluorouridine-3'-phosphate
  modified_base 10: mod_base = OTHER; note = 2'-O-methylguanosine-3'-phosphate
  modified_base 11: mod_base = OTHER; note = 2'-O-methyladenosine-3'-phosphate
  modified_base 12: mod_base = OTHER; note = 2'-O-methyluridine-3'-phosphate
  modified_base 13: mod_base = OTHER; note = 2'-O-methylcytidine-3'-phosphate
  modified_base 14: mod_base = OTHER; note = 2'-fluoroadenosine-3'-phosphate
  modified_base 15: mod_base = OTHER; note = 2'-O-methyladenosine-3'-phosphate
  modified_base 16: mod_base = OTHER; note = 2'-fluoroguanosine-3'-phosphate
  modified_base 17: mod_base = OTHER; note = 2'-O-methyladenosine-3'-phosphate
  modified_base 18: mod_base = OTHER; note = 2'-O-methyluridine-3'-phosphate
  modified_base 19: mod_base = OTHER; note = 2'-O-methyluridine-3'-phosphate
  modified_base 20: mod_base = OTHER; note = 2'-O-methyluridine-3'-phosphate
  modified_base 21: mod_base = OTHER; note = 2'-O-methyluridine-3'-phosphorothioate
  modified_base 22: mod_base = OTHER; note = 2'-O-methylguanosine-3'-phosphorothioate
  modified_base 23: mod_base = OTHER; note = 2'-O-methylguanosine-3'-phosphate
ttcttaactgatcaagattttgg

SEQ ID NO: 358 - RNA, 23 nt, synthetic construct
  misc_feature 1..23: note = Description of Artificial Sequence: Synthetic oligonucleotide
  source 1..23: mol_type = other RNA
  modified_base 1: mod_base = OTHER; note = 2'-O-methyluridine-3'-phosphorothioate
  modified_base 2: mod_base = OTHER; note = 2'-fluoroadenosine-3'-phosphorothioate
  modified_base 3: mod_base = OTHER; note = 2'-O-methyladenosine-3'-phosphate
  modified_base 4: mod_base = OTHER; note = 2'-O-methyluridine-3'-phosphate
  modified_base 5: mod_base = OTHER; note = 2'-O-methyladenosine-3'-phosphate
  modified_base 6: mod_base = OTHER; note = 2'-fluoroadenosine-3'-phosphate
  modified_base 7: mod_base = OTHER; note = 2'-O-methyluridine-3'-phosphate
  modified_base 8: mod_base = OTHER; note = 2'-fluorocytidine-3'-phosphate
  modified_base 9: mod_base = OTHER; note = 2'-fluorocytidine-3'-phosphate
  modified_base 10: mod_base = OTHER; note = 2'-O-methylcytidine-3'-phosphate
  modified_base 11: mod_base = OTHER; note = 2'-O-methyladenosine-3'-phosphate
  modified_base 12: mod_base = OTHER; note = 2'-O-methyluridine-3'-phosphate
  modified_base 13: mod_base = OTHER; note = 2'-O-methylguanosine-3'-phosphate
  modified_base 14: mod_base = OTHER; note = 2'-fluorocytidine-3'-phosphate
  modified_base 15: mod_base = OTHER; note = 2'-O-methyluridine-3'-phosphate
  modified_base 16: mod_base = OTHER; note = 2'-fluorouridine-3'-phosphate
  modified_base 17: mod_base = OTHER; note = 2'-O-methyluridine-3'-phosphate
  modified_base 18: mod_base = OTHER; note = 2'-O-methylguanosine-3'-phosphate
  modified_base 19: mod_base = OTHER; note = 2'-O-methyladenosine-3'-phosphate
  modified_base 20: mod_base = OTHER; note = 2'-O-methylguanosine-3'-phosphate
  modified_base 21: mod_base = OTHER; note = 2'-O-methyluridine-3'-phosphorothioate
  modified_base 22: mod_base = OTHER; note = 2'-O-methyladenosine-3'-phosphorothioate
  modified_base 23: mod_base = OTHER; note = 2'-O-methylguanosine-3'-phosphate
taataatcccatgctttgagtag

SEQ ID NO: 359 - RNA, 23 nt, synthetic construct
  misc_feature 1..23: note = Description of Artificial Sequence: Synthetic oligonucleotide
  source 1..23: mol_type = other RNA
  modified_base 1: mod_base = OTHER; note = 2'-O-methyluridine-3'-phosphorothioate
  modified_base 2: mod_base = OTHER; note = 2'-fluoroguanosine-3'-phosphorothioate
  modified_base 3: mod_base = OTHER; note = 2'-O-methylcytidine-3'-phosphate
  modified_base 4: mod_base = OTHER; note = 2'-O-methylcytidine-3'-phosphate
  modified_base 5: mod_base = OTHER; note = 2'-O-methyladenosine-3'-phosphate
  modified_base 6: mod_base = OTHER; note = 2'-fluorouridine-3'-phosphate
  modified_base 7: mod_base = OTHER; note = 2'-O-methyluridine-3'-phosphate
  modified_base 8: mod_base = OTHER; note = 2'-fluoroadenosine-3'-phosphate
  modified_base 9: mod_base = OTHER; note = 2'-fluorocytidine-3'-phosphate
  modified_base 10: mod_base = OTHER; note = 2'-O-methyladenosine-3'-phosphate
  modified_base 11: mod_base = OTHER; note = 2'-O-methyluridine-3'-phosphate
  modified_base 12: mod_base = OTHER; note = 2'-O-methylguanosine-3'-phosphate
  modified_base 13: mod_base = OTHER; note = 2'-O-methylguanosine-3'-phosphate
  modified_base 14: mod_base = OTHER; note = 2'-fluorouridine-3'-phosphate
  modified_base 15: mod_base = OTHER; note = 2'-O-methyladenosine-3'-phosphate
  modified_base 16: mod_base = OTHER; note = 2'-fluoroadenosine-3'-phosphate
  modified_base 17: mod_base = OTHER; note = 2'-O-methyluridine-3'-phosphate
  modified_base 18: mod_base = OTHER; note = 2'-O-methylguanosine-3'-phosphate
  modified_base 19: mod_base = OTHER; note = 2'-O-methylguanosine-3'-phosphate
  modified_base 20: mod_base = OTHER; note = 2'-O-methylguanosine-3'-phosphate
  modified_base 21: mod_base = OTHER; note = 2'-O-methyladenosine-3'-phosphorothioate
  modified_base 22: mod_base = OTHER; note = 2'-O-methylguanosine-3'-phosphorothioate
  modified_base 23: mod_base = OTHER; note = 2'-O-methyluridine-3'-phosphate
tgccattacatggtaatgggagt

SEQ ID NO: 360 - RNA, 23 nt, synthetic construct
  misc_feature 1..23: note = Description of Artificial Sequence: Synthetic oligonucleotide
  source 1..23: mol_type = other RNA
  modified_base 1: mod_base = OTHER; note = 2'-O-methyladenosine-3'-phosphorothioate
  modified_base 2: mod_base = OTHER; note = 2'-fluorocytidine-3'-phosphorothioate
  modified_base 3: mod_base = OTHER; note = 2'-O-methyluridine-3'-phosphate
  modified_base 4: mod_base = OTHER; note = 2'-O-methylguanosine-3'-phosphate
  modified_base 5: mod_base = OTHER; note = 2'-O-methyladenosine-3'-phosphate
  modified_base 6: mod_base = OTHER; note = 2'-fluoroguanosine-3'-phosphate
  modified_base 7: mod_base = OTHER; note = 2'-O-methyladenosine-3'-phosphate
  modified_base 8: mod_base = OTHER; note = 2'-fluorocytidine-3'-phosphate
  modified_base 9: mod_base = OTHER; note = 2'-fluorouridine-3'-phosphate
  modified_base 10: mod_base = OTHER; note = 2'-O-methyladenosine-3'-phosphate
  modified_base 11: mod_base = OTHER; note = 2'-O-methyladenosine-3'-phosphate
  modified_base 12: mod_base = OTHER; note = 2'-O-methyluridine-3'-phosphate
  modified_base 13: mod_base = OTHER; note = 2'-O-methylguanosine-3'-phosphate
  modified_base 14: mod_base = OTHER; note = 2'-fluorouridine-3'-phosphate
  modified_base 15: mod_base = OTHER; note = 2'-O-methylcytidine-3'-phosphate
  modified_base 16: mod_base = OTHER; note = 2'-fluoroadenosine-3'-phosphate
  modified_base 17: mod_base = OTHER; note = 2'-O-methyladenosine-3'-phosphate
  modified_base 18: mod_base = OTHER; note = 2'-O-methylcytidine-3'-phosphate
  modified_base 19: mod_base = OTHER; note = 2'-O-methyladenosine-3'-phosphate
  modified_base 20: mod_base = OTHER; note = 2'-O-methyladenosine-3'-phosphate
  modified_base 21: mod_base = OTHER; note = 2'-O-methyladenosine-3'-phosphorothioate
  modified_base 22: mod_base = OTHER; note = 2'-O-methyladenosine-3'-phosphorothioate
  modified_base 23: mod_base = OTHER; note = 2'-O-methyladenosine-3'-phosphate
actgagactaatgtcaacaaaaa

SEQ ID NO: 361 - RNA, 23 nt, synthetic construct
  misc_feature 1..23: note = Description of Artificial Sequence: Synthetic oligonucleotide
  source 1..23: mol_type = other RNA
  modified_base 1: mod_base = OTHER; note = 2'-O-methyluridine-3'-phosphorothioate
  modified_base 2: mod_base = OTHER; note = 2'-fluoroadenosine-3'-phosphorothioate
  modified_base 3: mod_base = OTHER; note = 2'-O-methyluridine-3'-phosphate
  modified_base 4: mod_base = OTHER; note = 2'-O-methyluridine-3'-phosphate
  modified_base 5: mod_base = OTHER; note = 2'-O-methyladenosine-3'-phosphate
  modified_base 6: mod_base = OTHER; note = 2'-fluoroguanosine-3'-phosphate
  modified_base 7: mod_base = OTHER; note = 2'-O-methyluridine-3'-phosphate
  modified_base 8: mod_base = OTHER; note = 2'-fluoroadenosine-3'-phosphate
  modified_base 9: mod_base = OTHER; note = 2'-fluorouridine-3'-phosphate
  modified_base 10: mod_base = OTHER; note = 2'-O-methylcytidine-3'-phosphate
  modified_base 11: mod_base = OTHER; note = 2'-O-methyladenosine-3'-phosphate
  modified_base 12: mod_base = OTHER; note = 2'-O-methyluridine-3'-phosphate
  modified_base 13: mod_base = OTHER; note = 2'-O-methylcytidine-3'-phosphate
  modified_base 14: mod_base = OTHER; note = 2'-fluorocytidine-3'-phosphate
  modified_base 15: mod_base = OTHER; note = 2'-O-methyladenosine-3'-phosphate
  modified_base 16: mod_base = OTHER; note = 2'-fluoroguanosine-3'-phosphate
  modified_base 17: mod_base = OTHER; note = 2'-O-methylguanosine-3'-phosphate
  modified_base 18: mod_base = OTHER; note = 2'-O-methyladenosine-3'-phosphate
  modified_base 19: mod_base = OTHER; note = 2'-O-methylcytidine-3'-phosphate
  modified_base 20: mod_base = OTHER; note = 2'-O-methyluridine-3'-phosphate
  modified_base 21: mod_base = OTHER; note = 2'-O-methylcytidine-3'-phosphorothioate
  modified_base 22: mod_base = OTHER; note = 2'-O-methyladenosine-3'-phosphorothioate
  modified_base 23: mod_base = OTHER; note = 2'-O-methylguanosine-3'-phosphate
tattagtatcatccaggactcag

SEQ ID NO: 362 - RNA, 23 nt, synthetic construct
  misc_feature 1..23: note = Description of Artificial Sequence: Synthetic oligonucleotide
  source 1..23: mol_type = other RNA
  modified_base 1: mod_base = OTHER; note = 2'-O-methyladenosine-3'-phosphorothioate
  modified_base 2: mod_base = OTHER; note = 2'-fluoroguanosine-3'-phosphorothioate
  modified_base 3: mod_base = OTHER; note = 2'-O-methyladenosine-3'-phosphate
  modified_base 4: mod_base = OTHER; note = 2'-O-methylcytidine-3'-phosphate
  modified_base 5: mod_base = OTHER; note = 2'-O-methyladenosine-3'-phosphate
  modified_base 6: mod_base = OTHER; note = 2'-fluorocytidine-3'-phosphate
  modified_base 7: mod_base = OTHER; note = 2'-O-methyluridine-3'-phosphate
  modified_base 8: mod_base = OTHER; note = 2'-fluoroguanosine-3'-phosphate
  modified_base 9: mod_base = OTHER; note = 2'-fluorouridine-3'-phosphate
  modified_base 10: mod_base = OTHER; note = 2'-O-methyladenosine-3'-phosphate
  modified_base 11: mod_base = OTHER; note = 2'-O-methylcytidine-3'-phosphate
  modified_base 12: mod_base = OTHER; note = 2'-O-methyladenosine-3'-phosphate
  modified_base 13: mod_base = OTHER; note = 2'-O-methylguanosine-3'-phosphate
  modified_base 14: mod_base = OTHER; note = 2'-fluorouridine-3'-phosphate
  modified_base 15: mod_base = OTHER; note = 2'-O-methyluridine-3'-phosphate
  modified_base 16: mod_base = OTHER; note = 2'-fluorouridine-3'-phosphate
  modified_base 17: mod_base = OTHER; note = 2'-O-methyladenosine-3'-phosphate
  modified_base 18: mod_base = OTHER; note = 2'-O-methyladenosine-3'-phosphate
  modified_base 19: mod_base = OTHER; note = 2'-O-methyladenosine-3'-phosphate
  modified_base 20: mod_base = OTHER; note = 2'-O-methyladenosine-3'-phosphate
  modified_base 21: mod_base = OTHER; note = 2'-O-methyladenosine-3'-phosphorothioate
  modified_base 22: mod_base = OTHER; note = 2'-O-methylcytidine-3'-phosphorothioate
  modified_base 23: mod_base = OTHER; note = 2'-O-methyladenosine-3'-phosphate
agacactgtacagtttaaaaaca

SEQ ID NO: 363 - RNA, 23 nt, synthetic construct
  misc_feature 1..23: note = Description of Artificial Sequence: Synthetic oligonucleotide
  source 1..23: mol_type = other RNA
  modified_base 1: mod_base = OTHER; note = 2'-O-methyluridine-3'-phosphorothioate
  modified_base 2: mod_base = OTHER; note = 2'-fluoroguanosine-3'-phosphorothioate
  modified_base 3: mod_base = OTHER; note = 2'-O-methyluridine-3'-phosphate
  modified_base 4: mod_base = OTHER; note = 2'-O-methyladenosine-3'-phosphate
  modified_base 5: mod_base = OTHER; note = 2'-O-methylguanosine-3'-phosphate
  modified_base 6: mod_base = OTHER; note = 2'-fluorouridine-3'-phosphate
  modified_base 7: mod_base = OTHER; note = 2'-O-methylguanosine-3'-phosphate
  modified_base 8: mod_base = OTHER; note = 2'-fluorouridine-3'-phosphate
  modified_base 9: mod_base = OTHER; note = 2'-fluoroguanosine-3'-phosphate
  modified_base 10: mod_base = OTHER; note = 2'-O-methyluridine-3'-phosphate
  modified_base 11: mod_base = OTHER; note = 2'-O-methyluridine-3'-phosphate
  modified_base 12: mod_base = OTHER; note = 2'-O-methyladenosine-3'-phosphate
  modified_base 13: mod_base = OTHER; note = 2'-O-methyladenosine-3'-phosphate
  modified_base 14: mod_base = OTHER; note = 2'-fluorocytidine-3'-phosphate
  modified_base 15: mod_base = OTHER; note = 2'-O-methyluridine-3'-phosphate
  modified_base 16: mod_base = OTHER; note = 2'-fluoroadenosine-3'-phosphate
  modified_base 17: mod_base = OTHER; note = 2'-O-methyluridine-3'-phosphate
  modified_base 18: mod_base = OTHER; note = 2'-O-methyladenosine-3'-phosphate
  modified_base 19: mod_base = OTHER; note = 2'-O-methylcytidine-3'-phosphate
  modified_base 20: mod_base = OTHER; note = 2'-O-methyladenosine-3'-phosphate
  modified_base 21: mod_base = OTHER; note = 2'-O-methyladenosine-3'-phosphorothioate
  modified_base 22: mod_base = OTHER; note = 2'-O-methyladenosine-3'-phosphorothioate
  modified_base 23: mod_base = OTHER; note = 2'-O-methyladenosine-3'-phosphate
tgtagtgtgttaactatacaaaa

SEQ ID NO: 364 - RNA, 23 nt, synthetic construct
  misc_feature 1..23: note = Description of Artificial Sequence: Synthetic oligonucleotide
  source 1..23: mol_type = other RNA
  modified_base 1: mod_base = OTHER; note = 2'-O-methyladenosine-3'-phosphorothioate
  modified_base 2: mod_base = OTHER; note = 2'-fluorocytidine-3'-phosphorothioate
  modified_base 3: mod_base = OTHER; note = 2'-O-methyladenosine-3'-phosphate
  modified_base 4: mod_base = OTHER; note = 2'-O-methylcytidine-3'-phosphate
  modified_base 5: mod_base = OTHER; note = 2'-O-methyladenosine-3'-phosphate
  modified_base 6: mod_base = OTHER; note = 2'-fluorouridine-3'-phosphate
  modified_base 7: mod_base = OTHER; note = 2'-O-methyluridine-3'-phosphate
  modified_base 8: mod_base = OTHER; note = 2'-fluorocytidine-3'-phosphate
  modified_base 9: mod_base = OTHER; note = 2'-fluoroguanosine-3'-phosphate
  modified_base 10: mod_base = OTHER; note = 2'-O-methylguanosine-3'-phosphate
  modified_base 11: mod_base = OTHER; note = 2'-O-methyluridine-3'-phosphate
  modified_base 12: mod_base = OTHER; note = 2'-O-methyladenosine-3'-phosphate
  modified_base 13: mod_base = OTHER; note = 2'-O-methylguanosine-3'-phosphate
  modified_base 14: mod_base = OTHER; note = 2'-fluorouridine-3'-phosphate
  modified_base 15: mod_base = OTHER; note = 2'-O-methylguanosine-3'-phosphate
  modified_base 16: mod_base = OTHER; note = 2'-fluorouridine-3'-phosphate
  modified_base 17: mod_base = OTHER; note = 2'-O-methylguanosine-3'-phosphate
  modified_base 18: mod_base = OTHER; note = 2'-O-methyluridine-3'-phosphate
  modified_base 19: mod_base = OTHER; note = 2'-O-methyluridine-3'-phosphate
  modified_base 20: mod_base = OTHER; note = 2'-O-methyladenosine-3'-phosphate
  modified_base 21: mod_base = OTHER; note = 2'-O-methyladenosine-3'-phosphorothioate
  modified_base 22: mod_base = OTHER; note = 2'-O-methylcytidine-3'-phosphorothioate
  modified_base 23: mod_base = OTHER; note = 2'-O-methyluridine-3'-phosphate
acacattcggtagtgtgttaact

SEQ ID NO: 365 - RNA, 23 nt, synthetic construct
  misc_feature 1..23: note = Description of Artificial Sequence: Synthetic oligonucleotide
  source 1..23: mol_type = other RNA
  modified_base 1: mod_base = OTHER; note = 2'-O-methyluridine-3'-phosphorothioate
  modified_base 2: mod_base = OTHER; note = 2'-fluoroguanosine-3'-phosphorothioate
  modified_base 3: mod_base = OTHER; note = 2'-O-methyladenosine-3'-phosphate
  modified_base 4: mod_base = OTHER; note = 2'-O-methyladenosine-3'-phosphate
  modified_base 5: mod_base = OTHER; note = 2'-O-methyladenosine-3'-phosphate
  modified_base 6: mod_base = OTHER; note = 2'-fluoroadenosine-3'-phosphate
  modified_base 7: mod_base = OTHER; note = 2'-O-methylcytidine-3'-phosphate
  modified_base 8: mod_base = OTHER; note = 2'-fluorouridine-3'-phosphate
  modified_base 9: mod_base = OTHER; note = 2'-fluoroadenosine-3'-phosphate
  modified_base 10: mod_base = OTHER; note = 2'-O-methyluridine-3'-phosphate
  modified_base 11: mod_base = OTHER; note = 2'-O-methylcytidine-3'-phosphate
  modified_base 12: mod_base = OTHER; note = 2'-O-methyluridine-3'-phosphate
  modified_base 13: mod_base = OTHER; note = 2'-O-methylcytidine-3'-phosphate
  modified_base 14: mod_base = OTHER; note = 2'-fluoroadenosine-3'-phosphate
  modified_base 15: mod_base = OTHER; note = 2'-O-methyladenosine-3'-phosphate
  modified_base 16: mod_base = OTHER; note = 2'-fluorocytidine-3'-phosphate
  modified_base 17: mod_base = OTHER; note = 2'-O-methyluridine-3'-phosphate
  modified_base 18: mod_base = OTHER; note = 2'-O-methyluridine-3'-phosphate
  modified_base 19: mod_base = OTHER; note = 2'-O-methyladenosine-3'-phosphate
  modified_base 20: mod_base = OTHER; note = 2'-O-methyladenosine-3'-phosphate
  modified_base 21: mod_base = OTHER; note = 2'-O-methylcytidine-3'-phosphorothioate
  modified_base 22: mod_base = OTHER; note = 2'-O-methyluridine-3'-phosphorothioate
  modified_base 23: mod_base = OTHER; note = 2'-O-methyluridine-3'-phosphate
tgaaaactatctcaacttaactt

SEQ ID NO: 366 - RNA, 23 nt, synthetic construct
  misc_feature 1..23: note = Description of Artificial Sequence: Synthetic oligonucleotide
  source 1..23: mol_type = other RNA
  modified_base 1: mod_base = OTHER; note = 2'-O-methyluridine-3'-phosphorothioate
  modified_base 2: mod_base = OTHER; note = 2'-fluoroadenosine-3'-phosphorothioate
  modified_base 3: mod_base = OTHER; note = 2'-O-methyluridine-3'-phosphate
  modified_base 4: mod_base = OTHER; note = 2'-O-methylcytidine-3'-phosphate
  modified_base 5: mod_base = OTHER; note = 2'-O-methyluridine-3'-phosphate
  modified_base 6: mod_base = OTHER; note = 2'-fluoroadenosine-3'-phosphate
  modified_base 7: mod_base = OTHER; note = 2'-O-methyluridine-3'-phosphate
  modified_base 8: mod_base = OTHER; note = 2'-fluoroadenosine-3'-phosphate
  modified_base 9: mod_base = OTHER; note = 2'-fluoroguanosine-3'-phosphate
  modified_base 10: mod_base = OTHER; note = 2'-O-methylcytidine-3'-phosphate
  modified_base 11: mod_base = OTHER; note = 2'-O-methylcytidine-3'-phosphate
  modified_base 12: mod_base = OTHER; note = 2'-O-methyladenosine-3'-phosphate
  modified_base 13: mod_base = OTHER; note = 2'-O-methylguanosine-3'-phosphate
  modified_base 14: mod_base = OTHER; note = 2'-fluorocytidine-3'-phosphate
  modified_base 15: mod_base = OTHER; note = 2'-O-methyladenosine-3'-phosphate
  modified_base 16: mod_base = OTHER; note = 2'-fluorouridine-3'-phosphate
  modified_base 17: mod_base = OTHER; note = 2'-O-methyluridine-3'-phosphate
  modified_base 18: mod_base = OTHER; note = 2'-O-methyluridine-3'-phosphate
  modified_base 19: mod_base = OTHER; note = 2'-O-methyluridine-3'-phosphate
  modified_base 20: mod_base = OTHER; note = 2'-O-methylcytidine-3'-phosphate
  modified_base 21: mod_base = OTHER; note = 2'-O-methyladenosine-3'-phosphorothioate
  modified_base 22: mod_base = OTHER; note = 2'-O-methyluridine-3'-phosphorothioate
  modified_base 23: mod_base = OTHER; note = 2'-O-methyladenosine-3'-phosphate
tatctatagccagcattttcata

SEQ ID NO: 367 - RNA, 23 nt, synthetic construct
  misc_feature 1..23: note = Description of Artificial Sequence: Synthetic oligonucleotide
  source 1..23: mol_type = other RNA
  modified_base 1: mod_base = OTHER; note = 2'-O-methyluridine-3'-phosphorothioate
  modified_base 2: mod_base = OTHER; note = 2'-fluoroadenosine-3'-phosphorothioate
  modified_base 3: mod_base = OTHER; note = 2'-O-methylguanosine-3'-phosphate
  modified_base 4: mod_base = OTHER; note = 2'-O-methyladenosine-3'-phosphate
  modified_base 5: mod_base = OTHER; note = 2'-O-methyluridine-3'-phosphate
  modified_base 6: mod_base = OTHER; note = 2'-fluoroguanosine-3'-phosphate
  modified_base 7: mod_base = OTHER; note = 2'-O-methyluridine-3'-phosphate
  modified_base 8: mod_base = OTHER; note = 2'-fluorouridine-3'-phosphate
  modified_base 9: mod_base = OTHER; note = 2'-fluorocytidine-3'-phosphate
  modified_base 10: mod_base = OTHER; note = 2'-O-methyladenosine-3'-phosphate
  modified_base 11: mod_base = OTHER; note = 2'-O-methylguanosine-3'-phosphate
  modified_base 12: mod_base = OTHER; note = 2'-O-methyluridine-3'-phosphate
  modified_base 13: mod_base = OTHER; note = 2'-O-methyladenosine-3'-phosphate
  modified_base 14: mod_base = OTHER; note = 2'-fluorouridine-3'-phosphate
  modified_base 15: mod_base = OTHER; note = 2'-O-methyluridine-3'-phosphate
  modified_base 16: mod_base = OTHER; note = 2'-fluorocytidine-3'-phosphate
  modified_base 17: mod_base = OTHER; note = 2'-O-methylcytidine-3'-phosphate
  modified_base 18: mod_base = OTHER; note = 2'-O-methyluridine-3'-phosphate
  modified_base 19: mod_base = OTHER; note = 2'-O-methylcytidine-3'-phosphate
  modified_base 20: mod_base = OTHER; note = 2'-O-methylcytidine-3'-phosphate
  modified_base 21: mod_base = OTHER; note = 2'-O-methyluridine-3'-phosphorothioate
  modified_base 22: mod_base = OTHER; note = 2'-O-methylguanosine-3'-phosphorothioate
  modified_base 23: mod_base = OTHER; note = 2'-O-methyladenosine-3'-phosphate
tagatgttcagtattcctcctga

SEQ ID NO: 368 - RNA, 23 nt, synthetic construct
  misc_feature 1..23: note = Description of Artificial Sequence: Synthetic oligonucleotide
  source 1..23: mol_type = other RNA
  modified_base 1: mod_base = OTHER; note = 2'-O-methyluridine-3'-phosphorothioate
  modified_base 2: mod_base = OTHER; note = 2'-fluorouridine-3'-phosphorothioate
  modified_base 3: mod_base = OTHER; note = 2'-O-methyladenosine-3'-phosphate
  modified_base 4: mod_base = OTHER; note = 2'-O-methylguanosine-3'-phosphate
  modified_base 5: mod_base = OTHER; note = 2'-O-methyluridine-3'-phosphate
  modified_base 6: mod_base = OTHER; note = 2'-fluoroguanosine-3'-phosphate
  modified_base 7: mod_base = OTHER; note = 2'-O-methyluridine-3'-phosphate
  modified_base 8: mod_base = OTHER; note = 2'-fluoroguanosine-3'-phosphate
  modified_base 9: mod_base = OTHER; note = 2'-fluorouridine-3'-phosphate
  modified_base 10: mod_base = OTHER; note = 2'-O-methyluridine-3'-phosphate
  modified_base 11: mod_base = OTHER; note = 2'-O-methyladenosine-3'-phosphate
  modified_base 12: mod_base = OTHER; note = 2'-O-methyladenosine-3'-phosphate
  modified_base 13: mod_base = OTHER; note = 2'-O-methylcytidine-3'-phosphate
  modified_base 14: mod_base = OTHER; note = 2'-fluorouridine-3'-phosphate
  modified_base 15: mod_base = OTHER; note = 2'-O-methyladenosine-3'-phosphate
  modified_base 16: mod_base = OTHER; note = 2'-fluorouridine-3'-phosphate
  modified_base 17: mod_base = OTHER; note = 2'-O-methyladenosine-3'-phosphate
  modified_base 18: mod_base = OTHER; note = 2'-O-methylcytidine-3'-phosphate
  modified_base 19: mod_base = OTHER; note = 2'-O-methyladenosine-3'-phosphate
  modified_base 20: mod_base = OTHER; note = 2'-O-methyladenosine-3'-phosphate
  modified_base 21: mod_base = OTHER; note = 2'-O-methyladenosine-3'-phosphorothioate
  modified_base 22: mod_base = OTHER; note = 2'-O-methyladenosine-3'-phosphorothioate
  modified_base 23: mod_base = OTHER; note = 2'-O-methyladenosine-3'-phosphate
ttagtgtgttaactatacaaaaa

SEQ ID NO: 369 - RNA, 23 nt, synthetic construct
  misc_feature 1..23: note = Description of Artificial Sequence: Synthetic oligonucleotide
  source 1..23: mol_type = other RNA
  modified_base 1: mod_base = OTHER; note = 2'-O-methyluridine-3'-phosphorothioate
  modified_base 2: mod_base = OTHER; note = 2'-fluoroguanosine-3'-phosphorothioate
  modified_base 3: mod_base = OTHER; note = 2'-O-methyluridine-3'-phosphate
  modified_base 4: mod_base = OTHER; note = 2'-O-methyladenosine-3'-phosphate
  modified_base 5: mod_base = OTHER; note = 2'-O-methyladenosine-3'-phosphate
  modified_base 6: mod_base = OTHER; note = 2'-fluoroadenosine-3'-phosphate
  modified_base 7: mod_base = OTHER; note = 2'-O-methylguanosine-3'-phosphate
  modified_base 8: mod_base = OTHER; note = 2'-fluoroguanosine-3'-phosphate
  modified_base 9: mod_base = OTHER; note = 2'-fluorouridine-3'-phosphate
  modified_base 10: mod_base = OTHER; note = 2'-O-methyluridine-3'-phosphate
  modified_base 11: mod_base = OTHER; note = 2'-O-methyladenosine-3'-phosphate
  modified_base 12: mod_base = OTHER; note = 2'-O-methylguanosine-3'-phosphate
  modified_base 13: mod_base = OTHER; note = 2'-O-methyladenosine-3'-phosphate
  modified_base 14: mod_base = OTHER; note = 2'-fluoroadenosine-3'-phosphate
  modified_base 15: mod_base = OTHER; note = 2'-O-methylcytidine-3'-phosphate
  modified_base 16: mod_base = OTHER; note = 2'-fluoroadenosine-3'-phosphate
  modified_base 17: mod_base = OTHER; note = 2'-O-methyluridine-3'-phosphate
  modified_base 18: mod_base = OTHER; note = 2'-O-methyladenosine-3'-phosphate
  modified_base 19: mod_base = OTHER; note = 2'-O-methylcytidine-3'-phosphate
  modified_base 20: mod_base = OTHER; note = 2'-O-methyluridine-3'-phosphate
  modified_base 21: mod_base = OTHER; note = 2'-O-methyluridine-3'-phosphorothioate
  modified_base 22: mod_base = OTHER; note = 2'-O-methyluridine-3'-phosphorothioate
  modified_base 23: mod_base = OTHER; note = 2'-O-methyluridine-3'-phosphate
tgtaaaggttagaacatactttt

SEQ ID NO: 370 - RNA, 23 nt, synthetic construct
  misc_feature 1..23: note = Description of Artificial Sequence: Synthetic oligonucleotide
  source 1..23: mol_type = other RNA
  modified_base 1: mod_base = OTHER; note = 2'-O-methyladenosine-3'-phosphorothioate
  modified_base 2: mod_base = OTHER; note = 2'-fluoroadenosine-3'-phosphorothioate
  modified_base 3: mod_base = OTHER; note = 2'-O-methyladenosine-3'-phosphate
  modified_base 4: mod_base = OTHER; note = 2'-O-methyladenosine-3'-phosphate
  modified_base 5: mod_base = OTHER; note = 2'-O-methylguanosine-3'-phosphate
  modified_base 6: mod_base = OTHER; note = 2'-fluorocytidine-3'-phosphate
  modified_base 7: mod_base = OTHER; note = 2'-O-methyluridine-3'-phosphate
  modified_base 8: mod_base = OTHER; note = 2'-fluoroguanosine-3'-phosphate
  modified_base 9: mod_base = OTHER; note = 2'-fluoroguanosine-3'-phosphate
  modified_base 10: mod_base = OTHER; note = 2'-O-methylcytidine-3'-phosphate
  modified_base 11: mod_base = OTHER; note = 2'-O-methylcytidine-3'-phosphate
  modified_base 12: mod_base = OTHER; note = 2'-O-methylcytidine-3'-phosphate
  modified_base 13: mod_base = OTHER; note = 2'-O-methyladenosine-3'-phosphate
  modified_base 14: mod_base = OTHER; note = 2'-fluoroadenosine-3'-phosphate
  modified_base 15: mod_base = OTHER; note = 2'-O-methyluridine-3'-phosphate
  modified_base 16: mod_base = OTHER; note = 2'-fluorouridine-3'-phosphate
  modified_base 17: mod_base = OTHER; note = 2'-O-methyladenosine-3'-phosphate
  modified_base 18: mod_base = OTHER; note = 2'-O-methyladenosine-3'-phosphate
  modified_base 19: mod_base = OTHER; note = 2'-O-methyluridine-3'-phosphate
  modified_base 20: mod_base = OTHER; note = 2'-O-methyluridine-3'-phosphate
  modified_base 21: mod_base = OTHER; note = 2'-O-methyladenosine-3'-phosphorothioate
  modified_base 22: mod_base = OTHER; note = 2'-O-methyladenosine-3'-phosphorothioate
  modified_base 23: mod_base = OTHER; note = 2'-O-methyladenosine-3'-phosphate
aaaagctggcccaattaattaaa

SEQ ID NO: 371 - RNA, 23 nt, synthetic construct
  misc_feature 1..23: note = Description of Artificial Sequence: Synthetic oligonucleotide
  source 1..23: mol_type = other RNA
  modified_base 1: mod_base = OTHER; note = 2'-O-methyluridine-3'-phosphorothioate
  modified_base 2: mod_base = OTHER; note = 2'-fluorouridine-3'-phosphorothioate
  modified_base 3: mod_base = OTHER; note = 2'-O-methylcytidine-3'-phosphate
  modified_base 4: mod_base = OTHER; note = 2'-O-methyluridine-3'-phosphate
  modified_base 5: mod_base = OTHER; note = 2'-O-methyladenosine-3'-phosphate
  modified_base 6: mod_base = OTHER; note = 2'-fluoroadenosine-3'-phosphate
  modified_base 7: mod_base = OTHER; note = 2'-O-methyluridine-3'-phosphate
  modified_base 8: mod_base = OTHER; note = 2'-fluoroadenosine-3'-phosphate
  modified_base 9: mod_base = OTHER; note = 2'-fluoroadenosine-3'-phosphate
  modified_base 10: mod_base = OTHER; note = 2'-O-methyluridine-3'-phosphate
  modified_base 11: mod_base = OTHER; note = 2'-O-methylcytidine-3'-phosphate
  modified_base 12: mod_base = OTHER; note = 2'-O-methylcytidine-3'-phosphate
  modified_base 13: mod_base = OTHER; note = 2'-O-methylcytidine-3'-phosphate
  modified_base 14: mod_base = OTHER; note = 2'-fluoroadenosine-3'-phosphate
  modified_base 15: mod_base = OTHER; note = 2'-O-methyluridine-3'-phosphate
  modified_base 16: mod_base = OTHER; note = 2'-fluoroguanosine-3'-phosphate
  modified_base 17: mod_base = OTHER; note = 2'-O-methylcytidine-3'-phosphate
  modified_base 18: mod_base = OTHER; note = 2'-O-methyluridine-3'-phosphate
  modified_base 19: mod_base = OTHER; note = 2'-O-methyluridine-3'-phosphate
  modified_base 20: mod_base = OTHER; note = 2'-O-methyluridine-3'-phosphate
  modified_base 21: mod_base = OTHER; note = 2'-O-methylguanosine-3'-phosphorothioate
  modified_base 22: mod_base = OTHER; note = 2'-O-methyladenosine-3'-phosphorothioate
  modified_base 23: mod_base = OTHER; note = 2'-O-methylguanosine-3'-phosphate
ttctaataatcccatgctttgag

SEQ ID NO: 372 - RNA, 23 nt, synthetic construct
  misc_feature 1..23: note = Description of Artificial Sequence: Synthetic oligonucleotide
  source 1..23: mol_type = other RNA
  modified_base 1: mod_base = OTHER; note = 2'-O-methyluridine-3'-phosphorothioate
  modified_base 2: mod_base = OTHER; note = 2'-fluorouridine-3'-phosphorothioate
  modified_base 3: mod_base = OTHER; note = 2'-O-methyladenosine-3'-phosphate
  modified_base 4: mod_base = OTHER; note = 2'-O-methyluridine-3'-phosphate
  modified_base 5: mod_base = OTHER; note = 2'-O-methyluridine-3'-phosphate
  modified_base 6: mod_base = OTHER; note = 2'-fluoroadenosine-3'-phosphate
  modified_base 7: mod_base = OTHER; note = 2'-O-methylguanosine-3'-phosphate
  modified_base 8: mod_base = OTHER; note = 2'-fluorouridine-3'-phosphate
  modified_base 9: mod_base = OTHER; note = 2'-fluorocytidine-3'-phosphate
  modified_base 10: mod_base = OTHER; note = 2'-O-methylcytidine-3'-phosphate
  modified_base 11: mod_base = OTHER; note = 2'-O-methyluridine-3'-phosphate
  modified_base 12: mod_base = OTHER; note = 2'-O-methyluridine-3'-phosphate
  modified_base 13: mod_base = OTHER; note = 2'-O-methylcytidine-3'-phosphate
  modified_base 14: mod_base = OTHER; note = 2'-fluoroadenosine-3'-phosphate
  modified_base 15: mod_base = OTHER; note = 2'-O-methyladenosine-3'-phosphate
  modified_base 16: mod_base = OTHER; note = 2'-fluoroguanosine-3'-phosphate
  modified_base 17: mod_base = OTHER; note = 2'-O-methylguanosine-3'-phosphate
  modified_base 18: mod_base = OTHER; note = 2'-O-methyladenosine-3'-phosphate
  modified_base 19: mod_base = OTHER; note = 2'-O-methylcytidine-3'-phosphate
  modified_base 20: mod_base = OTHER; note = 2'-O-methyladenosine-3'-phosphate
  modified_base 21: mod_base = OTHER; note = 2'-O-methylguanosine-3'-phosphorothioate
  modified_base 22: mod_base = OTHER; note = 2'-O-methyladenosine-3'-phosphorothioate
  modified_base 23: mod_base = OTHER; note = 2'-O-methylcytidine-3'-phosphate
ttattagtccttcaaggacagac

SEQ ID NO: 373 - RNA, 23 nt, synthetic construct
  misc_feature 1..23: note = Description of Artificial Sequence: Synthetic oligonucleotide
  source 1..23: mol_type = other RNA
  modified_base 1: mod_base = OTHER; note = 2'-O-methyluridine-3'-phosphorothioate
  modified_base 2: mod_base = OTHER; note = 2'-fluoroadenosine-3'-phosphorothioate
  modified_base 3: mod_base = OTHER; note = 2'-O-methyluridine-3'-phosphate
  modified_base 4: mod_base = OTHER; note = 2'-O-methyladenosine-3'-phosphate
  modified_base 5: mod_base = OTHER; note = 2'-O-methyladenosine-3'-phosphate
  modified_base 6: mod_base = OTHER; note = 2'-fluorocytidine-3'-phosphate
  modified_base 7: mod_base = OTHER; note = 2'-O-methyluridine-3'-phosphate
  modified_base 8: mod_base = OTHER; note = 2'-fluoroguanosine-3'-phosphate
  modified_base 9: mod_base = OTHER; note = 2'-fluorocytidine-3'-phosphate
  modified_base 10: mod_base = OTHER; note = 2'-O-methylcytidine-3'-phosphate
  modified_base 11: mod_base = OTHER; note = 2'-O-methyladenosine-3'-phosphate
  modified_base 12: mod_base = OTHER; note = 2'-O-methyluridine-3'-phosphate
  modified_base 13: mod_base = OTHER; note = 2'-O-methyluridine-3'-phosphate
  modified_base 14: mod_base = OTHER; note = 2'-fluoroadenosine-3'-phosphate
  modified_base 15: mod_base = OTHER; note = 2'-O-methylcytidine-3'-phosphate
  modified_base 16: mod_base = OTHER; note = 2'-fluoroadenosine-3'-phosphate
  modified_base 17: mod_base = OTHER; note = 2'-O-methyluridine-3'-phosphate
  modified_base 18: mod_base = OTHER; note = 2'-O-methylguanosine-3'-phosphate
  modified_base 19: mod_base = OTHER; note = 2'-O-methylguanosine-3'-phosphate
  modified_base 20: mod_base = OTHER; note = 2'-O-methyluridine-3'-phosphate
  modified_base 21: mod_base = OTHER; note = 2'-O-methyladenosine-3'-phosphorothioate
  modified_base 22: mod_base = OTHER; note = 2'-O-methyladenosine-3'-phosphorothioate
  modified_base 23: mod_base = OTHER; note = 2'-O-methyluridine-3'-phosphate
tataactgccattacatggtaat

SEQ ID NO: 374 - RNA, 23 nt, synthetic construct
  misc_feature 1..23: note = Description of Artificial Sequence: Synthetic oligonucleotide
  source 1..23: mol_type = other RNA
  modified_base 1: mod_base = OTHER; note = 2'-O-methyluridine-3'-phosphorothioate
  modified_base 2: mod_base = OTHER; note = 2'-fluorouridine-3'-phosphorothioate
  modified_base 3: mod_base = OTHER; note = 2'-O-methylcytidine-3'-phosphate
  modified_base 4: mod_base = OTHER; note = 2'-O-methylcytidine-3'-phosphate
  modified_base 5: mod_base = OTHER; note = 2'-O-methyluridine-3'-phosphate
  modified_base 6: mod_base = OTHER; note = 2'-fluoroguanosine-3'-phosphate
  modified_base 7: mod_base = OTHER; note = 2'-O-methyladenosine-3'-phosphate
  modified_base 8: mod_base = OTHER; note = 2'-fluoroguanosine-3'-phosphate
  modified_base 9: mod_base = OTHER; note = 2'-fluorocytidine-3'-phosphate
  modified_base 10: mod_base = OTHER; note = 2'-O-methyladenosine-3'-phosphate
  modified_base 11: mod_base = OTHER; note = 2'-O-methylguanosine-3'-phosphate
  modified_base 12: mod_base = OTHER; note = 2'-O-methyluridine-3'-phosphate
  modified_base 13: mod_base = OTHER; note = 2'-O-methylcytidine-3'-phosphate
  modified_base 14: mod_base = OTHER; note = 2'-fluorocytidine-3'-phosphate
  modified_base 15: mod_base = OTHER; note = 2'-O-methyladenosine-3'-phosphate
  modified_base 16: mod_base = OTHER; note = 2'-fluorouridine-3'-phosphate
  modified_base 17: mod_base = OTHER; note = 2'-O-methyladenosine-3'-phosphate
  modified_base 18: mod_base = OTHER; note = 2'-O-methyluridine-3'-phosphate
  modified_base 19: mod_base = OTHER; note = 2'-O-methyluridine-3'-phosphate
  modified_base 20: mod_base = OTHER; note = 2'-O-methyluridine-3'-phosphate
  modified_base 21: mod_base = OTHER; note = 2'-O-methyladenosine-3'-phosphorothioate
  modified_base 22: mod_base = OTHER; note = 2'-O-methylguanosine-3'-phosphorothioate
  modified_base 23: mod_base = OTHER; note = 2'-O-methyladenosine-3'-phosphate
ttcctgagcagtccatatttaga

SEQ ID NO: 375 - RNA, 23 nt, synthetic construct
  misc_feature 1..23: note = Description of Artificial Sequence: Synthetic oligonucleotide
  source 1..23: mol_type = other RNA
  modified_base 1: mod_base = OTHER; note = 2'-O-methyluridine-3'-phosphorothioate
  modified_base 2: mod_base = OTHER; note = 2'-fluorocytidine-3'-phosphorothioate
  modified_base 3: mod_base = OTHER; note = 2'-O-methylguanosine-3'-phosphate
  modified_base 4: mod_base = OTHER; note = 2'-O-methylguanosine-3'-phosphate
  modified_base 5: mod_base = OTHER; note = 2'-O-methyluridine-3'-phosphate
  modified_base 6: mod_base = OTHER; note = 2'-fluoroadenosine-3'-phosphate
  modified_base 7: mod_base = OTHER; note = 2'-O-methylguanosine-3'-phosphate
  modified_base 8: mod_base = OTHER; note = 2'-fluorouridine-3'-phosphate
  modified_base 9: mod_base = OTHER; note = 2'-fluoroguanosine-3'-phosphate
  modified_base 10: mod_base = OTHER; note = 2'-O-methyluridine-3'-phosphate
  modified_base 11: mod_base = OTHER; note = 2'-O-methylguanosine-3'-phosphate
  modified_base 12: mod_base = OTHER; note = 2'-O-methyluridine-3'-phosphate
  modified_base 13: mod_base = OTHER; note = 2'-O-methyluridine-3'-phosphate
  modified_base 14: mod_base = OTHER; note = 2'-fluoroadenosine-3'-phosphate
  modified_base 15: mod_base = OTHER; note = 2'-O-methyladenosine-3'-phosphate
  modified_base 16: mod_base = OTHER; note = 2'-fluorocytidine-3'-phosphate
  modified_base 17: mod_base = OTHER; note = 2'-O-methyluridine-3'-phosphate
  modified_base 18: mod_base = OTHER; note = 2'-O-methyladenosine-3'-phosphate
  modified_base 19: mod_base = OTHER; note = 2'-O-methyluridine-3'-phosphate
  modified_base 20: mod_base = OTHER; note = 2'-O-methyladenosine-3'-phosphate
  modified_base 21: mod_base = OTHER; note = 2'-O-methylcytidine-3'-phosphorothioate
  modified_base 22: mod_base = OTHER; note = 2'-O-methyladenosine-3'-phosphorothioate
  modified_base 23: mod_base = OTHER; note = 2'-O-methyladenosine-3'-phosphate
tcggtagtgtgttaactatacaa

SEQ ID NO: 376 - RNA, 23 nt, synthetic construct
  misc_feature 1..23: note = Description of Artificial Sequence: Synthetic oligonucleotide
  source 1..23: mol_type = other RNA
  modified_base 1: mod_base = OTHER; note = 2'-O-methyladenosine-3'-phosphorothioate
  modified_base 2: mod_base = OTHER; note = 2'-fluoroguanosine-3'-phosphorothioate
  modified_base 3: mod_base = OTHER; note = 2'-O-methyladenosine-3'-phosphate
  modified_base 4: mod_base = OTHER; note = 2'-O-methyladenosine-3'-phosphate
  modified_base 5: mod_base = OTHER; note = 2'-O-methyluridine-3'-phosphate
  modified_base 6: mod_base = OTHER; note = 2'-fluoroadenosine-3'-phosphate
  modified_base 7: mod_base = OTHER; note = 2'-O-methylguanosine-3'-phosphate
  modified_base 8: mod_base = OTHER; note = 2'-fluoroadenosine-3'-phosphate
  modified_base 9: mod_base = OTHER; note = 2'-fluoroguanosine-3'-phosphate
  modified_base 10: mod_base = OTHER; note = 2'-O-methyluridine-3'-phosphate
  modified_base 11: mod_base = OTHER; note = 2'-O-methylcytidine-3'-phosphate
  modified_base 12: mod_base = OTHER; note = 2'-O-methylcytidine-3'-phosphate
  modified_base 13: mod_base = OTHER; note = 2'-O-methyluridine-3'-phosphate
  modified_base 14: mod_base = OTHER; note = 2'-fluorocytidine-3'-phosphate
  modified_base 15: mod_base = OTHER; note = 2'-O-methyladenosine-3'-phosphate
  modified_base 16: mod_base = OTHER; note = 2'-fluorouridine-3'-phosphate
  modified_base 17: mod_base = OTHER; note = 2'-O-methylguanosine-3'-phosphate
  modified_base 18: mod_base = OTHER; note = 2'-O-methyluridine-3'-phosphate
  modified_base 19: mod_base = OTHER; note = 2'-O-methyladenosine-3'-phosphate
  modified_base 20: mod_base = OTHER; note = 2'-O-methyladenosine-3'-phosphate
  modified_base 21: mod_base = OTHER; note = 2'-O-methyladenosine-3'-phosphorothioate
  modified_base 22: mod_base = OTHER; note = 2'-O-methylguanosine-3'-phosphorothioate
  modified_base 23: mod_base = OTHER; note = 2'-O-methylguanosine-3'-phosphate
agaatagagtcctcatgtaaagg

SEQ ID NO: 377 - RNA, 23 nt, synthetic construct
  misc_feature 1..23: note = Description of Artificial Sequence: Synthetic oligonucleotide
  source 1..23: mol_type = other RNA
  modified_base 1: mod_base = OTHER; note = 2'-O-methyluridine-3'-phosphorothioate
  modified_base 2: mod_base = OTHER; note = 2'-fluorocytidine-3'-phosphorothioate
  modified_base 3: mod_base = OTHER; note = 2'-O-methyladenosine-3'-phosphate
  modified_base 4: mod_base = OTHER; note = 2'-O-methyluridine-3'-phosphate
  modified_base 5: mod_base = OTHER; note = 2'-O-methyluridine-3'-phosphate
  modified_base 6: mod_base = OTHER; note = 2'-fluoroadenosine-3'-phosphate
  modified_base 7: mod_base = OTHER; note = 2'-O-methylcytidine-3'-phosphate
  modified_base 8: mod_base = OTHER; note = 2'-fluoroadenosine-3'-phosphate
  modified_base 9: mod_base = OTHER; note = 2'-fluorouridine-3'-phosphate
  modified_base 10: mod_base = OTHER; note = 2'-O-methylguanosine-3'-phosphate
  modified_base 11: mod_base = OTHER; note = 2'-O-methylguanosine-3'-phosphate
  modified_base 12: mod_base = OTHER; note = 2'-O-methyluridine-3'-phosphate
  modified_base 13: mod_base = OTHER; note = 2'-O-methyladenosine-3'-phosphate
  modified_base 14: mod_base = OTHER; note = 2'-fluoroadenosine-3'-phosphate
  modified_base 15: mod_base = OTHER; note = 2'-O-methyluridine-3'-phosphate
  modified_base 16: mod_base = OTHER; note = 2'-fluoroguanosine-3'-phosphate
  modified_base 17: mod_base = OTHER; note = 2'-O-methylguanosine-3'-phosphate
  modified_base 18: mod_base = OTHER; note = 2'-O-methylguanosine-3'-phosphate
  modified_base 19: mod_base = OTHER; note = 2'-O-methyladenosine-3'-phosphate
  modified_base 20: mod_base = OTHER; note = 2'-O-methylguanosine-3'-phosphate
  modified_base 21: mod_base = OTHER; note = 2'-O-methyluridine-3'-phosphorothioate
  modified_base 22: mod_base = OTHER; note = 2'-O-methyluridine-3'-phosphorothioate
  modified_base 23: mod_base = OTHER; note = 2'-O-methyladenosine-3'-phosphate
tcattacatggtaatgggagtta

SEQ ID NO: 378 - RNA, 23 nt, synthetic construct
  misc_feature 1..23: note = Description of Artificial Sequence: Synthetic oligonucleotide
  source 1..23: mol_type = other RNA
  modified_base 1: mod_base = OTHER; note = 2'-O-methyluridine-3'-phosphorothioate
  modified_base 2: mod_base = OTHER; note = 2'-fluorouridine-3'-phosphorothioate
  modified_base 3: mod_base = OTHER; note = 2'-O-methylguanosine-3'-phosphate
  modified_base 4: mod_base = OTHER; note = 2'-O-methyluridine-3'-phosphate
  modified_base 5: mod_base = OTHER; note = 2'-O-methylguanosine-3'-phosphate
  modified_base 6: mod_base = OTHER; note = 2'-fluorouridine-3'-phosphate
  modified_base 7: mod_base = OTHER; note = 2'-O-methyladenosine-3'-phosphate
  modified_base 8: mod_base = OTHER; note = 2'-fluoroguanosine-3'-phosphate
  modified_base 9: mod_base = OTHER; note = 2'-fluoroadenosine-3'-phosphate
  modified_base 10: mod_base = OTHER; note = 2'-O-methylcytidine-3'-phosphate
  modified_base 11: mod_base = OTHER; note = 2'-O-methyladenosine-3'-phosphate
  modified_base 12: mod_base = OTHER; note = 2'-O-methyladenosine-3'-phosphate
  modified_base 13: mod_base = OTHER; note = 2'-O-methyladenosine-3'-phosphate
  modified_base 14: mod_base = OTHER; note = 2'-fluoroadenosine-3'-phosphate
  modified_base 15: mod_base = OTHER; note = 2'-O-methylguanosine-3'-phosphate
  modified_base 16: mod_base = OTHER; note = 2'-fluorocytidine-3'-phosphate
  modified_base 17: mod_base = OTHER; note = 2'-O-methyluridine-3'-phosphate
  modified_base 18: mod_base = OTHER; note = 2'-O-methyluridine-3'-phosphate
  modified_base 19: mod_base = OTHER; note = 2'-O-methyluridine-3'-phosphate
  modified_base 20: mod_base = OTHER; note = 2'-O-methyluridine-3'-phosphate
  modified_base 21: mod_base = OTHER; note = 2'-O-methyluridine-3'-phosphorothioate
  modified_base 22: mod_base = OTHER; note = 2'-O-methyladenosine-3'-phosphorothioate
  modified_base 23: mod_base = OTHER; note = 2'-O-methyluridine-3'-phosphate
ttgtgtagacaaaagctttttat

SEQ ID NO: 379 - RNA, 23 nt, synthetic construct
  misc_feature 1..23: note = Description of Artificial Sequence: Synthetic oligonucleotide
  source 1..23: mol_type = other RNA
  modified_base 1: mod_base = OTHER; note = 2'-O-methyluridine-3'-phosphorothioate
  modified_base 2: mod_base = OTHER; note = 2'-fluorocytidine-3'-phosphorothioate
  modified_base 3: mod_base = OTHER; note = 2'-O-methyladenosine-3'-phosphate
  modified_base 4: mod_base = OTHER; note = 2'-O-methylguanosine-3'-phosphate
  modified_base 5: mod_base = OTHER; note = 2'-O-methyluridine-3'-phosphate
  modified_base 6: mod_base = OTHER; note = 2'-fluorouridine-3'-phosphate
  modified_base 7: mod_base = OTHER; note = 2'-O-methyladenosine-3'-phosphate
  modified_base 8: mod_base = OTHER; note = 2'-fluorouridine-3'-phosphate
  modified_base 9: mod_base = OTHER; note = 2'-fluoroguanosine-3'-phosphate
  modified_base 10: mod_base = OTHER; note = 2'-O-methylguanosine-3'-phosphate
  modified_base 11: mod_base = OTHER; note = 2'-O-methyladenosine-3'-phosphate
  modified_base 12: mod_base = OTHER; note = 2'-O-methyluridine-3'-phosphate
  modified_base 13: mod_base = OTHER; note = 2'-O-methylguanosine-3'-phosphate
  modified_base 14: mod_base = OTHER; note = 2'-fluoroadenosine-3'-phosphate
  modified_base 15: mod_base = OTHER; note = 2'-O-methyladenosine-3'-phosphate
  modified_base 16: mod_base = OTHER; note = 2'-fluoroadenosine-3'-phosphate
  modified_base 17: mod_base = OTHER; note = 2'-O-methyladenosine-3'-phosphate
  modified_base 18: mod_base = OTHER; note = 2'-O-methylcytidine-3'-phosphate
  modified_base 19: mod_base = OTHER; note = 2'-O-methyluridine-3'-phosphate
  modified_base 20: mod_base = OTHER; note = 2'-O-methyladenosine-3'-phosphate
  modified_base 21: mod_base = OTHER; note = 2'-O-methyluridine-3'-phosphorothioate
  modified_base 22: mod_base = OTHER; note = 2'-O-methylcytidine-3'-phosphorothioate
  modified_base 23: mod_base = OTHER; note = 2'-O-methyluridine-3'-phosphate
tcagttatggatgaaaactatct

SEQ ID NO: 380 - RNA, 23 nt, synthetic construct
  misc_feature 1..23: note = Description of Artificial Sequence: Synthetic oligonucleotide
  source 1..23: mol_type = other RNA
  modified_base 1: mod_base = OTHER; note = 2'-O-methyluridine-3'-phosphorothioate
  modified_base 2: mod_base = OTHER; note = 2'-fluoroguanosine-3'-phosphorothioate
  modified_base 3: mod_base = OTHER; note = 2'-O-methyluridine-3'-phosphate
  modified_base 4: mod_base = OTHER; note = 2'-O-methyluridine-3'-phosphate
  modified_base 5: mod_base = OTHER; note = 2'-O-methyluridine-3'-phosphate
  modified_base 6: mod_base = OTHER; note = 2'-fluoroguanosine-3'-phosphate
  modified_base 7: mod_base = OTHER; note = 2'-O-methyladenosine-3'-phosphate
  modified_base 8: mod_base = OTHER; note = 2'-fluorouridine-3'-phosphate
  modified_base 9: mod_base = OTHER; note = 2'-fluorouridine-3'-phosphate
  modified_base 10: mod_base = OTHER; note = 2'-O-methylcytidine-3'-phosphate
  modified_base 11: mod_base = OTHER; note = 2'-O-methyluridine-3'-phosphate
  modified_base 12: mod_base = OTHER; note = 2'-O-methyladenosine-3'-phosphate
  modified_base 13: mod_base = OTHER; note = 2'-O-methyladenosine-3'-phosphate
  modified_base 14: mod_base = OTHER; note = 2'-fluorouridine-3'-phosphate
  modified_base 15: mod_base = OTHER; note = 2'-O-methyladenosine-3'-phosphate
  modified_base 16: mod_base = OTHER; note = 2'-fluoroadenosine-3'-phosphate
  modified_base 17: mod_base = OTHER; note = 2'-O-methyluridine-3'-phosphate
  modified_base 18: mod_base = OTHER; note = 2'-O-methylcytidine-3'-phosphate
  modified_base 19: mod_base = OTHER; note = 2'-O-methylcytidine-3'-phosphate
  modified_base 20: mod_base = OTHER; note = 2'-O-methylcytidine-3'-phosphate
  modified_base 21: mod_base = OTHER; note = 2'-O-methyladenosine-3'-phosphorothioate
  modified_base 22: mod_base = OTHER; note = 2'-O-methyluridine-3'-phosphorothioate
  modified_base 23: mod_base = OTHER; note = 2'-O-methylguanosine-3'-phosphate
tgtttgattctaataatcccatg

SEQ ID NO: 381 - RNA, 23 nt, synthetic construct
  misc_feature 1..23: note = Description of Artificial Sequence: Synthetic oligonucleotide
  source 1..23: mol_type = other RNA
  modified_base 1: mod_base = OTHER; note = 2'-O-methyladenosine-3'-phosphorothioate
  modified_base 2: mod_base = OTHER; note = 2'-fluoroadenosine-3'-phosphorothioate
  modified_base 3: mod_base = OTHER; note = 2'-O-methyladenosine-3'-phosphate
  modified_base 4: mod_base = OTHER; note = 2'-O-methylguanosine-3'-phosphate
  modified_base 5: mod_base = OTHER; note = 2'-O-methylcytidine-3'-phosphate
  modified_base 6: mod_base = OTHER; note = 2'-fluoroadenosine-3'-phosphate
  modified_base 7: mod_base = OTHER; note = 2'-O-methyladenosine-3'-phosphate
  modified_base 8: mod_base = OTHER; note = 2'-fluoroadenosine-3'-phosphate
  modified_base 9: mod_base = OTHER; note = 2'-fluoroadenosine-3'-phosphate
  modified_base 10: mod_base = OTHER; note = 2'-O-methylguanosine-3'-phosphate
  modified_base 11: mod_base = OTHER; note = 2'-O-methyladenosine-3'-phosphate
  modified_base 12: mod_base = OTHER; note = 2'-O-methylcytidine-3'-phosphate
  modified_base 13: mod_base = OTHER; note = 2'-O-methyluridine-3'-phosphate
  modified_base 14: mod_base = OTHER; note = 2'-fluoroadenosine-3'-phosphate
  modified_base 15: mod_base = OTHER; note = 2'-O-methylguanosine-3'-phosphate
  modified_base 16: mod_base = OTHER; note = 2'-fluorocytidine-3'-phosphate
  modified_base 17: mod_base = OTHER; note = 2'-O-methyluridine-3'-phosphate
  modified_base 18: mod_base = OTHER; note = 2'-O-methyluridine-3'-phosphate
  modified_base 19: mod_base = OTHER; note = 2'-O-methylcytidine-3'-phosphate
  modified_base 20: mod_base = OTHER; note = 2'-O-methylcytidine-3'-phosphate
  modified_base 21: mod_base = OTHER; note = 2'-O-methylcytidine-3'-phosphorothioate
  modified_base 22: mod_base = OTHER; note = 2'-O-methylcytidine-3'-phosphorothioate
  modified_base 23: mod_base = OTHER; note = 2'-O-methyluridine-3'-phosphate
aaagcaaaagactagcttcccct

SEQ ID NO: 382 - RNA, 23 nt, synthetic construct
  misc_feature 1..23: note = Description of Artificial Sequence: Synthetic oligonucleotide
  source 1..23: mol_type = other RNA
  modified_base 1: mod_base = OTHER; note = 2'-O-methyluridine-3'-phosphorothioate
  modified_base 2: mod_base = OTHER; note = 2'-fluoroguanosine-3'-phosphorothioate
  modified_base 3: mod_base = OTHER; note = 2'-O-methyladenosine-3'-phosphate
  modified_base 4: mod_base = OTHER; note = 2'-O-methyluridine-3'-phosphate
  modified_base 5: mod_base = OTHER; note = 2'-O-methylguanosine-3'-phosphate
  modified_base 6: mod_base = OTHER; note = 2'-fluoroadenosine-3'-phosphate
  modified_base 7: mod_base = OTHER; note = 2'-O-methyladenosine-3'-phosphate
  modified_base 8: mod_base = OTHER; note = 2'-fluoroadenosine-3'-phosphate
  modified_base 9: mod_base = OTHER; note = 2'-fluoroadenosine-3'-phosphate
  modified_base 10: mod_base = OTHER; note = 2'-O-methylcytidine-3'-phosphate
  modified_base 11: mod_base = OTHER; note = 2'-O-methyluridine-3'-phosphate
  modified_base 12: mod_base = OTHER; note = 2'-O-methyladenosine-3'-phosphate
  modified_base 13: mod_base = OTHER; note = 2'-O-methyluridine-3'-phosphate
  modified_base 14: mod_base = OTHER; note = 2'-fluorocytidine-3'-phosphate
  modified_base 15: mod_base = OTHER; note = 2'-O-methyluridine-3'-phosphate
  modified_base 16: mod_base = OTHER; note = 2'-fluorocytidine-3'-phosphate
  modified_base 17: mod_base = OTHER; note = 2'-O-methyladenosine-3'-phosphate
  modified_base 18: mod_base = OTHER; note = 2'-O-methyladenosine-3'-phosphate
  modified_base 19: mod_base = OTHER; note = 2'-O-methylcytidine-3'-phosphate
  modified_base 20: mod_base = OTHER; note = 2'-O-methyluridine-3'-phosphate
  modified_base 21: mod_base = OTHER; note = 2'-O-methyluridine-3'-phosphorothioate
  modified_base 22: mod_base = OTHER; note = 2'-O-methyladenosine-3'-phosphorothioate
  modified_base 23: mod_base = OTHER; note = 2'-O-methyladenosine-3'-phosphate
tgatgaaaactatctcaacttaa

SEQ ID NO: 383 - RNA, 23 nt, synthetic construct
  misc_feature 1..23: note = Description of Artificial Sequence: Synthetic oligonucleotide
  source 1..23: mol_type = other RNA
  modified_base 1: mod_base = OTHER; note = 2'-O-methyluridine-3'-phosphorothioate
  modified_base 2: mod_base = OTHER; note = 2'-fluoroguanosine-3'-phosphorothioate
  modified_base 3: mod_base = OTHER; note = 2'-O-methylguanosine-3'-phosphate
  modified_base 4: mod_base = OTHER; note = 2'-O-methylguanosine-3'-phosphate
  modified_base 5: mod_base = OTHER; note = 2'-O-methylcytidine-3'-phosphate
  modified_base 6: mod_base = OTHER; note = 2'-fluorouridine-3'-phosphate
  modified_base 7: mod_base = OTHER; note = 2'-O-methyladenosine-3'-phosphate
  modified_base 8: mod_base = OTHER; note = 2'-fluorouridine-3'-phosphate
  modified_base 9: mod_base = OTHER; note = 2'-fluoroguanosine-3'-phosphate
  modified_base 10: mod_base = OTHER; note = 2'-O-methyluridine-3'-phosphate
  modified_base 11: mod_base = OTHER; note = 2'-O-methylguanosine-3'-phosphate
  modified_base 12: mod_base = OTHER; note = 2'-O-methyladenosine-3'-phosphate
  modified_base 13: mod_base = OTHER; note = 2'-O-methyladenosine-3'-phosphate
  modified_base 14: mod_base = OTHER; note = 2'-fluoroadenosine-3'-phosphate
  modified_base 15: mod_base = OTHER; note = 2'-O-methyluridine-3'-phosphate
  modified_base 16: mod_base = OTHER; note = 2'-fluorouridine-3'-phosphate
  modified_base 17: mod_base = OTHER; note = 2'-O-methyluridine-3'-phosphate
  modified_base 18: mod_base = OTHER; note = 2'-O-methylcytidine-3'-phosphate
  modified_base 19: mod_base = OTHER; note = 2'-O-methyluridine-3'-phosphate
  modified_base 20: mod_base = OTHER; note = 2'-O-methyluridine-3'-phosphate
  modified_base 21: mod_base = OTHER; note = 2'-O-methyladenosine-3'-phosphorothioate
  modified_base 22: mod_base = OTHER; note = 2'-O-methyladenosine-3'-phosphorothioate
  modified_base 23: mod_base = OTHER; note = 2'-O-methylcytidine-3'-phosphate
tgggctatgtgaaatttcttaac

SEQ ID NO: 384 - RNA, 23 nt, synthetic construct
  misc_feature 1..23: note = Description of Artificial Sequence: Synthetic oligonucleotide
  source 1..23: mol_type = other RNA
  modified_base 1: mod_base = OTHER; note = 2'-O-methyladenosine-3'-phosphorothioate
  modified_base 2: mod_base = OTHER; note = 2'-fluoroadenosine-3'-phosphorothioate
  modified_base 3: mod_base = OTHER; note = 2'-O-methylguanosine-3'-phosphate
  modified_base 4: mod_base = OTHER; note = 2'-O-methylcytidine-3'-phosphate
  modified_base 5: mod_base = OTHER; note = 2'-O-methyluridine-3'-phosphate
  modified_base 6: mod_base = OTHER; note = 2'-fluoroguanosine-3'-phosphate
  modified_base 7: mod_base = OTHER; note = 2'-O-methylguanosine-3'-phosphate
  modified_base 8: mod_base = OTHER; note = 2'-fluorocytidine-3'-phosphate
  modified_base 9: mod_base = OTHER; note = 2'-fluorocytidine-3'-phosphate
  modified_base 10: mod_base = OTHER; note = 2'-O-methylcytidine-3'-phosphate
  modified_base 11: mod_base = OTHER; note = 2'-O-methyladenosine-3'-phosphate
  modified_base 12: mod_base = OTHER; note = 2'-O-methyladenosine-3'-phosphate
  modified_base 13: mod_base = OTHER; note = 2'-O-methyluridine-3'-phosphate
  modified_base 14: mod_base = OTHER; note = 2'-fluorouridine-3'-phosphate
  modified_base 15: mod_base = OTHER; note = 2'-O-methyladenosine-3'-phosphate
  modified_base 16: mod_base = OTHER; note = 2'-fluoroadenosine-3'-phosphate
  modified_base 17: mod_base = OTHER; note = 2'-O-methyluridine-3'-phosphate
  modified_base 18: mod_base = OTHER; note = 2'-O-methyluridine-3'-phosphate
  modified_base 19: mod_base = OTHER; note = 2'-O-methyladenosine-3'-phosphate
  modified_base 20: mod_base = OTHER; note = 2'-O-methyladenosine-3'-phosphate
  modified_base 21: mod_base = OTHER; note = 2'-O-methyladenosine-3'-phosphorothioate
  modified_base 22: mod_base = OTHER; note = 2'-O-methyladenosine-3'-phosphorothioate
  modified_base 23: mod_base = OTHER; note = 2'-O-methyladenosine-3'-phosphate
aagctggcccaattaattaaaaa

SEQ ID NO: 385 - RNA, 23 nt, synthetic construct
  misc_feature 1..23: note = Description of Artificial Sequence: Synthetic oligonucleotide
  source 1..23: mol_type = other RNA
  modified_base 1: mod_base = OTHER; note = 2'-O-methyladenosine-3'-phosphorothioate
  modified_base 2: mod_base = OTHER; note = 2'-fluoroguanosine-3'-phosphorothioate
  modified_base 3: mod_base = OTHER; note = 2'-O-methyladenosine-3'-phosphate
  modified_base 4: mod_base = OTHER; note = 2'-O-methyladenosine-3'-phosphate
  modified_base 5: mod_base = OTHER; note = 2'-O-methyladenosine-3'-phosphate
  modified_base 6: mod_base = OTHER; note = 2'-fluoroadenosine-3'-phosphate
  modified_base 7: mod_base = OTHER; note = 2'-O-methylcytidine-3'-phosphate
  modified_base 8: mod_base = OTHER; note = 2'-fluoroguanosine-3'-phosphate
  modified_base 9: mod_base = OTHER; note = 2'-fluoroadenosine-3'-phosphate
  modified_base 10: mod_base = OTHER; note = 2'-O-methyluridine-3'-phosphate
  modified_base 11: mod_base = OTHER; note = 2'-O-methyladenosine-3'-phosphate
  modified_base 12: mod_base = OTHER; note = 2'-O-methyladenosine-3'-phosphate
  modified_base 13: mod_base = OTHER; note = 2'-O-methyluridine-3'-phosphate
  modified_base 14: mod_base = OTHER; note = 2'-fluorocytidine-3'-phosphate
  modified_base 15: mod_base = OTHER; note = 2'-O-methyluridine-3'-phosphate
  modified_base 16: mod_base = OTHER; note = 2'-fluorocytidine-3'-phosphate
  modified_base 17: mod_base = OTHER; note = 2'-O-methylguanosine-3'-phosphate
  modified_base 18: mod_base = OTHER; note = 2'-O-methyladenosine-3'-phosphate
  modified_base 19: mod_base = OTHER; note = 2'-O-methyladenosine-3'-phosphate
  modified_base 20: mod_base = OTHER; note = 2'-O-methyladenosine-3'-phosphate
  modified_base 21: mod_base = OTHER; note = 2'-O-methyladenosine-3'-phosphorothioate
  modified_base 22: mod_base = OTHER; note = 2'-O-methylcytidine-3'-phosphorothioate
  modified_base 23: mod_base = OTHER; note = 2'-O-methylcytidine-3'-phosphate
agaaaacgataatctcgaaaacc

SEQ ID NO: 386 - RNA, 23 nt, synthetic construct
  misc_feature 1..23: note = Description of Artificial Sequence: Synthetic oligonucleotide
  source 1..23: mol_type = other RNA
  modified_base 1: mod_base = OTHER; note = 2'-O-methyladenosine-3'-phosphorothioate
  modified_base 2: mod_base = OTHER; note = 2'-fluorouridine-3'-phosphorothioate
  modified_base 3: mod_base = OTHER; note = 2'-O-methylcytidine-3'-phosphate
  modified_base 4: mod_base = OTHER; note = 2'-O-methylcytidine-3'-phosphate
  modified_base 5: mod_base = OTHER; note = 2'-O-methylcytidine-3'-phosphate
  modified_base 6: mod_base = OTHER; note = 2'-fluoroadenosine-3'-phosphate
  modified_base 7: mod_base = OTHER; note = 2'-O-methyluridine-3'-phosphate
  modified_base 8: mod_base = OTHER; note = 2'-fluoroguanosine-3'-phosphate
  modified_base 9: mod_base = OTHER; note = 2'-fluorocytidine-3'-phosphate
  modified_base 10: mod_base = OTHER; note = 2'-O-methyluridine-3'-phosphate
  modified_base 11: mod_base = OTHER; note = 2'-O-methyluridine-3'-phosphate
  modified_base 12: mod_base = OTHER; note = 2'-O-methyluridine-3'-phosphate
  modified_base 13: mod_base = OTHER; note = 2'-O-methylguanosine-3'-phosphate
  modified_base 14: mod_base = OTHER; note = 2'-fluoroadenosine-3'-phosphate
  modified_base 15: mod_base = OTHER; note = 2'-O-methylguanosine-3'-phosphate
  modified_base 16: mod_base = OTHER; note = 2'-fluorouridine-3'-phosphate
  modified_base 17: mod_base = OTHER; note = 2'-O-methyladenosine-3'-phosphate
  modified_base 18: mod_base = OTHER; note = 2'-O-methylguanosine-3'-phosphate
  modified_base 19: mod_base = OTHER; note = 2'-O-methyladenosine-3'-phosphate
  modified_base 20: mod_base = OTHER; note = 2'-O-methyluridine-3'-phosphate
  modified_base 21: mod_base = OTHER; note = 2'-O-methyluridine-3'-phosphorothioate
  modified_base 22: mod_base = OTHER; note = 2'-O-methylguanosine-3'-phosphorothioate
  modified_base 23: mod_base = OTHER; note = 2'-O-methyladenosine-3'-phosphate
atcccatgctttgagtagattga

SEQ ID NO: 387 - RNA, 23 nt, synthetic construct
  misc_feature 1..23: note = Description of Artificial Sequence: Synthetic oligonucleotide
  source 1..23: mol_type = other RNA
  modified_base 1: mod_base = OTHER; note = 2'-O-methyluridine-3'-phosphorothioate
  modified_base 2: mod_base = OTHER; note = 2'-fluorouridine-3'-phosphorothioate
  modified_base 3: mod_base = OTHER; note = 2'-O-methylcytidine-3'-phosphate
  modified_base 4: mod_base = OTHER; note = 2'-O-methylguanosine-3'-phosphate
  modified_base 5: mod_base = OTHER; note = 2'-O-methyluridine-3'-phosphate
  modified_base 6: mod_base = OTHER; note = 2'-fluorouridine-3'-phosphate
  modified_base 7: mod_base = OTHER; note = 2'-O-methyluridine-3'-phosphate
  modified_base 8: mod_base = OTHER; note = 2'-fluorocytidine-3'-phosphate
  modified_base 9: mod_base = OTHER; note = 2'-fluorocytidine-3'-phosphate
  modified_base 10: mod_base = OTHER; note = 2'-O-methyluridine-3'-phosphate
  modified_base 11: mod_base = OTHER; note = 2'-O-methylguanosine-3'-phosphate
  modified_base 12: mod_base = OTHER; note = 2'-O-methyladenosine-3'-phosphate
  modified_base 13: mod_base = OTHER; note = 2'-O-methylguanosine-3'-phosphate
  modified_base 14: mod_base = OTHER; note = 2'-fluorocytidine-3'-phosphate
  modified_base 15: mod_base = OTHER; note = 2'-O-methyladenosine-3'-phosphate
  modified_base 16: mod_base = OTHER; note = 2'-fluoroguanosine-3'-phosphate
  modified_base 17: mod_base = OTHER; note = 2'-O-methyluridine-3'-phosphate
  modified_base 18: mod_base = OTHER; note = 2'-O-methylcytidine-3'-phosphate
  modified_base 19: mod_base = OTHER; note = 2'-O-methylcytidine-3'-phosphate
  modified_base 20: mod_base = OTHER; note = 2'-O-methyladenosine-3'-phosphate
  modified_base 21: mod_base = OTHER; note = 2'-O-methyluridine-3'-phosphorothioate
  modified_base 22: mod_base = OTHER; note = 2'-O-methyladenosine-3'-phosphorothioate
  modified_base 23: mod_base = OTHER; note = 2'-O-methyluridine-3'-phosphate
ttcgtttcctgagcagtccatat

SEQ ID NO: 388 - RNA, 23 nt, synthetic construct
  misc_feature 1..23: note = Description of Artificial Sequence: Synthetic oligonucleotide
  source 1..23: mol_type = other RNA
  modified_base 1: mod_base = OTHER; note = 2'-O-methyladenosine-3'-phosphorothioate
  modified_base 2: mod_base = OTHER; note = 2'-fluoroguanosine-3'-phosphorothioate
  modified_base 3: mod_base = OTHER; note = 2'-O-methyluridine-3'-phosphate
  modified_base 4: mod_base = OTHER; note = 2'-O-methyladenosine-3'-phosphate
  modified_base 5: mod_base = OTHER; note = 2'-O-methyluridine-3'-phosphate
  modified_base 6: mod_base = OTHER; note = 2'-fluorocytidine-3'-phosphate
  modified_base 7: mod_base = OTHER; note = 2'-O-methyladenosine-3'-phosphate
  modified_base 8: mod_base = OTHER; note = 2'-fluorouridine-3'-phosphate
  modified_base 9: mod_base = OTHER; note = 2'-fluorocytidine-3'-phosphate
  modified_base 10: mod_base = OTHER; note = 2'-O-methylcytidine-3'-phosphate
  modified_base 11: mod_base = OTHER; note = 2'-O-methyladenosine-3'-phosphate
  modified_base 12: mod_base = OTHER; note = 2'-O-methylguanosine-3'-phosphate
  modified_base 13: mod_base = OTHER; note = 2'-O-methylguanosine-3'-phosphate
  modified_base 14: mod_base = OTHER; note = 2'-fluoroadenosine-3'-phosphate
  modified_base 15: mod_base = OTHER; note = 2'-O-methylcytidine-3'-phosphate
  modified_base 16: mod_base = OTHER; note = 2'-fluorouridine-3'-phosphate
  modified_base 17: mod_base = OTHER; note = 2'-O-methylcytidine-3'-phosphate
  modified_base 18: mod_base = OTHER; note = 2'-O-methyladenosine-3'-phosphate
  modified_base 19: mod_base = OTHER; note = 2'-O-methylguanosine-3'-phosphate
  modified_base 20: mod_base = OTHER; note = 2'-O-methyladenosine-3'-phosphate
  modified_base 21: mod_base = OTHER; note = 2'-O-methyluridine-3'-phosphorothioate
  modified_base 22: mod_base = OTHER; note = 2'-O-methylguanosine-3'-phosphorothioate
  modified_base 23: mod_base = OTHER; note = 2'-O-methyluridine-3'-phosphate
agtatcatccaggactcagatgt

SEQ ID NO: 389 - RNA, 23 nt, synthetic construct
  misc_feature 1..23: note = Description of Artificial Sequence: Synthetic oligonucleotide
  source 1..23: mol_type = other RNA
  modified_base 1: mod_base = OTHER; note = 2'-O-methyluridine-3'-phosphorothioate
  modified_base 2: mod_base = OTHER; note = 2'-fluorocytidine-3'-phosphorothioate
  modified_base 3: mod_base = OTHER; note = 2'-O-methylguanosine-3'-phosphate
  modified_base 4: mod_base = OTHER; note = 2'-O-methyluridine-3'-phosphate
  modified_base 5: mod_base = OTHER; note = 2'-O-methyladenosine-3'-phosphate
  modified_base 6: mod_base = OTHER; note = 2'-fluorouridine-3'-phosphate
  modified_base 7: mod_base = OTHER; note = 2'-O-methyladenosine-3'-phosphate
  modified_base 8: mod_base = OTHER; note = 2'-fluoroadenosine-3'-phosphate
  modified_base 9: mod_base = OTHER; note = 2'-fluoroguanosine-3'-phosphate
  modified_base 10: mod_base = OTHER; note = 2'-O-methylcytidine-3'-phosphate
  modified_base 11: mod_base = OTHER; note = 2'-O-methyluridine-3'-phosphate
  modified_base 12: mod_base = OTHER; note = 2'-O-methylguanosine-3'-phosphate
  modified_base 13: mod_base = OTHER; note = 2'-O-methylcytidine-3'-phosphate
  modified_base 14: mod_base = OTHER; note = 2'-fluoroadenosine-3'-phosphate
  modified_base 15: mod_base = OTHER; note = 2'-O-methyluridine-3'-phosphate
  modified_base 16: mod_base = OTHER; note = 2'-fluorocytidine-3'-phosphate
  modified_base 17: mod_base = OTHER; note = 2'-O-methyladenosine-3'-phosphate
  modified_base 18: mod_base = OTHER; note = 2'-O-methylguanosine-3'-phosphate
  modified_base 19: mod_base = OTHER; note = 2'-O-methyladenosine-3'-phosphate
  modified_base 20: mod_base = OTHER; note = 2'-O-methylguanosine-3'-phosphate
  modified_base 21: mod_base = OTHER; note = 2'-O-methyladenosine-3'-phosphorothioate
  modified_base 22: mod_base = OTHER; note = 2'-O-methylcytidine-3'-phosphorothioate
  modified_base 23: mod_base = OTHER; note = 2'-O-methyladenosine-3'-phosphate
tcgtataagctgcatcagagaca

SEQ ID NO: 390 - RNA, 23 nt, synthetic construct
  misc_feature 1..23: note = Description of Artificial Sequence: Synthetic oligonucleotide
  source 1..23: mol_type = other RNA
  modified_base 1: mod_base = OTHER; note = 2'-O-methyluridine-3'-phosphorothioate
  modified_base 2: mod_base = OTHER; note = 2'-fluoroguanosine-3'-phosphorothioate
  modified_base 3: mod_base = OTHER; note = 2'-O-methylcytidine-3'-phosphate
  modified_base 4: mod_base = OTHER; note = 2'-O-methyladenosine-3'-phosphate
  modified_base 5: mod_base = OTHER; note = 2'-O-methyladenosine-3'-phosphate
  modified_base 6: mod_base = OTHER; note = 2'-fluoroadenosine-3'-phosphate
  modified_base 7: mod_base = OTHER; note = 2'-O-methyladenosine-3'-phosphate
  modified_base 8: mod_base = OTHER; note = 2'-fluorouridine-3'-phosphate
  modified_base 9: mod_base = OTHER; note = 2'-fluoroadenosine-3'-phosphate
  modified_base 10: mod_base = OTHER; note = 2'-O-methyluridine-3'-phosphate
  modified_base 11: mod_base = OTHER; note = 2'-O-methyladenosine-3'-phosphate
  modified_base 12: mod_base = OTHER; note = 2'-O-methyladenosine-3'-phosphate
  modified_base 13: mod_base = OTHER; note = 2'-O-methylcytidine-3'-phosphate
  modified_base 14: mod_base = OTHER; note = 2'-fluorouridine-3'-phosphate
  modified_base 15: mod_base = OTHER; note = 2'-O-methylguanosine-3'-phosphate
  modified_base 16: mod_base = OTHER; note = 2'-fluorocytidine-3'-phosphate
  modified_base 17: mod_base = OTHER; note = 2'-O-methylcytidine-3'-phosphate
  modified_base 18: mod_base = OTHER; note = 2'-O-methyladenosine-3'-phosphate
  modified_base 19: mod_base = OTHER; note = 2'-O-methyluridine-3'-phosphate
  modified_base 20: mod_base = OTHER; note = 2'-O-methyluridine-3'-phosphate
  modified_base 21: mod_base = OTHER; note = 2'-O-methyladenosine-3'-phosphorothioate
  modified_base 22: mod_base = OTHER; note = 2'-O-methylcytidine-3'-phosphorothioate
  modified_base 23: mod_base = OTHER; note = 2'-O-methyladenosine-3'-phosphate
tgcaaaatataactgccattaca

SEQ ID NO: 391 - RNA, 23 nt, synthetic construct
  misc_feature 1..23: note = Description of Artificial Sequence: Synthetic oligonucleotide
  source 1..23: mol_type = other RNA
  modified_base 1: mod_base = OTHER; note = 2'-O-methyluridine-3'-phosphorothioate
  modified_base 2: mod_base = OTHER; note = 2'-fluorouridine-3'-phosphorothioate
  modified_base 3: mod_base = OTHER; note = 2'-O-methylcytidine-3'-phosphate
  modified_base 4: mod_base = OTHER; note = 2'-O-methyluridine-3'-phosphate
  modified_base 5: mod_base = OTHER; note = 2'-O-methylcytidine-3'-phosphate
  modified_base 6: mod_base = OTHER; note = 2'-fluoroguanosine-3'-phosphate
  modified_base 7: mod_base = OTHER; note = 2'-O-methyluridine-3'-phosphate
  modified_base 8: mod_base = OTHER; note = 2'-fluorouridine-3'-phosphate
  modified_base 9: mod_base = OTHER; note = 2'-fluorouridine-3'-phosphate
  modified_base 10: mod_base = OTHER; note = 2'-O-methylcytidine-3'-phosphate
  modified_base 11: mod_base = OTHER; note = 2'-O-methylcytidine-3'-phosphate
  modified_base 12: mod_base = OTHER; note = 2'-O-methyluridine-3'-phosphate
  modified_base 13: mod_base = OTHER; note = 2'-O-methylguanosine-3'-phosphate
  modified_base 14: mod_base = OTHER; note = 2'-fluoroadenosine-3'-phosphate
  modified_base 15: mod_base = OTHER; note = 2'-O-methylguanosine-3'-phosphate
  modified_base 16: mod_base = OTHER; note = 2'-fluorocytidine-3'-phosphate
  modified_base 17: mod_base = OTHER; note = 2'-O-methyladenosine-3'-phosphate
  modified_base 18: mod_base = OTHER; note = 2'-O-methylguanosine-3'-phosphate
  modified_base 19: mod_base = OTHER; note = 2'-O-methyluridine-3'-phosphate
  modified_base 20: mod_base = OTHER; note = 2'-O-methylcytidine-3'-phosphate
  modified_base 21: mod_base = OTHER; note = 2'-O-methylcytidine-3'-phosphorothioate
  modified_base 22: mod_base = OTHER; note = 2'-O-methyladenosine-3'-phosphorothioate
  modified_base 23: mod_base = OTHER; note = 2'-O-methyluridine-3'-phosphate
ttctcgtttcctgagcagtccat

SEQ ID NO: 392 - RNA, 23 nt, synthetic construct
  misc_feature 1..23: note = Description of Artificial Sequence: Synthetic oligonucleotide
  source 1..23: mol_type = other RNA
  modified_base 1: mod_base = OTHER; note = 2'-O-methyluridine-3'-phosphorothioate
  modified_base 2: mod_base = OTHER; note = 2'-fluorouridine-3'-phosphorothioate
  modified_base 3: mod_base = OTHER; note = 2'-O-methylcytidine-3'-phosphate
  modified_base 4: mod_base = OTHER; note = 2'-O-methylcytidine-3'-phosphate
  modified_base 5: mod_base = OTHER; note = 2'-O-methyluridine-3'-phosphate
  modified_base 6: mod_base = OTHER; note = 2'-fluorocytidine-3'-phosphate
  modified_base 7: mod_base = OTHER; note = 2'-O-methylcytidine-3'-phosphate
  modified_base 8: mod_base = OTHER; note = 2'-fluorocytidine-3'-phosphate
  modified_base 9: mod_base = OTHER; note = 2'-fluoroguanosine-3'-phosphate
  modified_base 10: mod_base = OTHER; note = 2'-O-methyladenosine-3'-phosphate
  modified_base 11: mod_base = OTHER; note = 2'-O-methylcytidine-3'-phosphate
  modified_base 12: mod_base = OTHER; note = 2'-O-methyladenosine-3'-phosphate
  modified_base 13: mod_base = OTHER; note = 2'-O-methyladenosine-3'-phosphate
  modified_base 14: mod_base = OTHER; note = 2'-fluoroguanosine-3'-phosphate
  modified_base 15: mod_base = OTHER; note = 2'-O-methyluridine-3'-phosphate
  modified_base 16: mod_base = OTHER; note = 2'-fluorouridine-3'-phosphate
  modified_base 17: mod_base = OTHER; note = 2'-O-methyluridine-3'-phosphate
  modified_base 18: mod_base = OTHER; note = 2'-O-methylguanosine-3'-phosphate
  modified_base 19: mod_base = OTHER; note = 2'-O-methylcytidine-3'-phosphate
  modified_base 20: mod_base = OTHER; note = 2'-O-methyladenosine-3'-phosphate
  modified_base 21: mod_base = OTHER; note = 2'-O-methylcytidine-3'-phosphorothioate
  modified_base 22: mod_base = OTHER; note = 2'-O-methyladenosine-3'-phosphorothioate
  modified_base 23: mod_base = OTHER; note = 2'-O-methyladenosine-3'-phosphate
ttcctcccgacaagtttgcacaa

SEQ ID NO: 393 - RNA, 23 nt, synthetic construct
  misc_feature 1..23: note = Description of Artificial Sequence: Synthetic oligonucleotide
  source 1..23: mol_type = other RNA
tatacgaaataattgttgttctg

SEQ ID NO: 394 - RNA, 23 nt, synthetic construct
  misc_feature 1..23: note = Description of Artificial Sequence: Synthetic oligonucleotide
  source 1..23: mol_type = other RNA
ttatcctttcatatagttagcta

SEQ ID NO: 395 - RNA, 23 nt, synthetic construct
  misc_feature 1..23: note = Description of Artificial Sequence: Synthetic oligonucleotide
  source 1..23: mol_type = other RNA
ttcacatagcccacttacattta

SEQ ID NO: 396 - RNA, 23 nt, synthetic construct
  misc_feature 1..23: note = Description of Artificial Sequence: Synthetic oligonucleotide
  source 1..23: mol_type = other RNA
gagtcctggatgatactaataaa

SEQ ID NO: 397 - RNA, 23 nt, synthetic construct
  misc_feature 1..23: note = Description of Artificial Sequence: Synthetic oligonucleotide
  source 1..23: mol_type = other RNA
atttcacatagcccacttacatt

SEQ ID NO: 398 - RNA, 23 nt, synthetic construct
  misc_feature 1..23: note = Description of Artificial Sequence: Synthetic oligonucleotide
  source 1..23: mol_type = other RNA
cacatagcccacttacatttaca

SEQ ID NO: 399 - RNA, 23 nt, synthetic construct
  misc_feature 1..23: note = Description of Artificial Sequence: Synthetic oligonucleotide
  source 1..23: mol_type = other RNA
tttacatgaggactctattcttt

SEQ ID NO: 400 - RNA, 23 nt, synthetic construct
  misc_feature 1..23: note = Description of Artificial Sequence: Synthetic oligonucleotide
  source 1..23: mol_type = other RNA
catgaggactctattctttaact

SEQ ID NO: 401 - RNA, 23 nt, synthetic construct
  misc_feature 1..23: note = Description of Artificial Sequence: Synthetic oligonucleotide
  source 1..23: mol_type = other RNA
aaaagcgtgagcttaaaatacaa

SEQ ID NO: 402 - RNA, 23 nt, synthetic construct
  misc_feature 1..23: note = Description of Artificial Sequence: Synthetic oligonucleotide
  source 1..23: mol_type = other RNA
gtggttttcgagattatcgtttt

SEQ ID NO: 403 - RNA, 23 nt, synthetic construct
  misc_feature 1..23: note = Description of Artificial Sequence: Synthetic oligonucleotide
  source 1..23: mol_type = other RNA
cagtattttaaaatagcgttctt

SEQ ID NO: 404 - RNA, 23 nt, synthetic construct
  misc_feature 1..23: note = Description of Artificial Sequence: Synthetic oligonucleotide
  source 1..23: mol_type = other RNA
tattgttgtccttttcataggtc

SEQ ID NO: 405 - RNA, 23 nt, synthetic construct
  misc_feature 1..23: note = Description of Artificial Sequence: Synthetic oligonucleotide
  source 1..23: mol_type = other RNA
caggaaacgagactttccattac

SEQ ID NO: 406 - RNA, 23 nt, synthetic construct
  misc_feature 1..23: note = Description of Artificial Sequence: Synthetic oligonucleotide
  source 1..23: mol_type = other RNA
tggttttcgagattatcgttttc

SEQ ID NO: 407 - RNA, 23 nt, synthetic construct
  misc_feature 1..23: note = Description of Artificial Sequence: Synthetic oligonucleotide
  source 1..23: mol_type = other RNA
gatggagtgctgttttgttatat

SEQ ID NO: 408 - RNA, 23 nt, synthetic construct
  misc_feature 1..23: note = Description of Artificial Sequence: Synthetic oligonucleotide
  source 1..23: mol_type = other RNA
tctctgatgcagcttatacgaaa

SEQ ID NO: 409 - RNA, 23 nt, synthetic construct
  misc_feature 1..23: note = Description of Artificial Sequence: Synthetic oligonucleotide
  source 1..23: mol_type = other RNA
ctctgatgcagcttatacgaaat

SEQ ID NO: 410 - RNA, 23 nt, synthetic construct
  misc_feature 1..23: note = Description of Artificial Sequence: Synthetic oligonucleotide
  source 1..23: mol_type = other RNA
gagatagttttcatccataactg

SEQ ID NO: 411 - RNA, 23 nt, synthetic construct
  misc_feature 1..23: note = Description of Artificial Sequence: Synthetic oligonucleotide
  source 1..23: mol_type = other RNA
tttcacatagcccacttacattt

SEQ ID NO: 412 - RNA, 23 nt, synthetic construct
  misc_feature 1..23: note = Description of Artificial Sequence: Synthetic oligonucleotide
  source 1..23: mol_type = other RNA
ctttacatgaggactctattctt

SEQ ID NO: 413 - RNA, 23 nt, synthetic construct
  misc_feature 1..23: note = Description of Artificial Sequence: Synthetic oligonucleotide
  source 1..23: mol_type = other RNA
tgctggctatagatgtcttttcc

SEQ ID NO: 414 - RNA, 23 nt, synthetic construct
  misc_feature 1..23: note = Description of Artificial Sequence: Synthetic oligonucleotide
  source 1..23: mol_type = other RNA
gttttcgagattatcgttttctt

SEQ ID NO: 415 - RNA, 23 nt, synthetic construct
  misc_feature 1..23: note = Description of Artificial Sequence: Synthetic oligonucleotide
  source 1..23: mol_type = other RNA
cgttcttgtaattttacacgctt

SEQ ID NO: 416 - RNA, 23 nt, synthetic construct
  misc_feature 1..23: note = Description of Artificial Sequence: Synthetic oligonucleotide
  source 1..23: mol_type = other RNA
atagttaacacactaccgaatgt

SEQ ID NO: 417 - RNA, 23 nt, synthetic construct
  misc_feature 1..23: note = Description of Artificial Sequence: Synthetic oligonucleotide
  source 1..23: mol_type = other RNA
taaagttaagttgagatagtttt

SEQ ID NO: 418 - RNA, 23 nt, synthetic construct
  misc_feature 1..23: note = Description of Artificial Sequence: Synthetic oligonucleotide
  source 1..23: mol_type = other RNA
caaagcatgggattattagaatc

SEQ ID NO: 419 - RNA, 23 nt, synthetic construct
  misc_feature 1..23: note = Description of Artificial Sequence: Synthetic oligonucleotide
  source 1..23: mol_type = other RNA
gactctattctttaactcccatt

SEQ ID NO: 420 - RNA, 23 nt, synthetic construct
  misc_feature 1..23: note = Description of Artificial Sequence: Synthetic oligonucleotide
  source 1..23: mol_type = other RNA
gttcttgtaattttacacgcttt

SEQ ID NO: 421 - RNA, 23 nt, synthetic construct
  misc_feature 1..23: note = Description of Artificial Sequence: Synthetic oligonucleotide
  source 1..23: mol_type = other RNA
tatagttaacacactaccgaatg

SEQ ID NO: 422 - RNA, 23 nt, synthetic construct
  misc_feature 1..23: note = Description of Artificial Sequence: Synthetic oligonucleotide
  source 1..23: mol_type = other RNA
tagttaacacactaccgaatgtg

SEQ ID NO: 423 - RNA, 23 nt, synthetic construct
  misc_feature 1..23: note = Description of Artificial Sequence: Synthetic oligonucleotide
  source 1..23: mol_type = other RNA
gtctctgatgcagcttatacgaa

SEQ ID NO: 424 - RNA, 23 nt, synthetic construct
  misc_feature 1..23: note = Description of Artificial Sequence: Synthetic oligonucleotide
  source 1..23: mol_type = other RNA
cttttgtctacacaccctgcata

SEQ ID NO: 425 - RNA, 23 nt, synthetic construct
  misc_feature 1..23: note = Description of Artificial Sequence: Synthetic oligonucleotide
  source 1..23: mol_type = other RNA
tgagatagttttcatccataact

SEQ ID NO: 426 - RNA, 23 nt, synthetic construct
  misc_feature 1..23: note = Description of Artificial Sequence: Synthetic oligonucleotide
  source 1..23: mol_type = other RNA
tctactcaaagcatgggattatt

SEQ ID NO: 427 - RNA, 23 nt, synthetic construct
  misc_feature 1..23: note = Description of Artificial Sequence: Synthetic oligonucleotide
  source 1..23: mol_type = other RNA
ctttaactcccattaccatgtaa

SEQ ID NO: 428 - RNA, 23 nt, synthetic construct
  misc_feature 1..23: note = Description of Artificial Sequence: Synthetic oligonucleotide
  source 1..23: mol_type = other RNA
tttaactcccattaccatgtaat

SEQ ID NO: 429 - RNA, 23 nt, synthetic construct
  misc_feature 1..23: note = Description of Artificial Sequence: Synthetic oligonucleotide
  source 1..23: mol_type = other RNA
caaaagcgtgagcttaaaataca

SEQ ID NO: 430 - RNA, 23 nt, synthetic construct
  misc_feature 1..23: note = Description of Artificial Sequence: Synthetic oligonucleotide
  source 1..23: mol_type = other RNA
ttttgttgacattagtctcagtg

SEQ ID NO: 431 - RNA, 23 nt, synthetic construct
  misc_feature 1..23: note = Description of Artificial Sequence: Synthetic oligonucleotide
  source 1..23: mol_type = other RNA
ttttgtctacacaccctgcatat

SEQ ID NO: 432 - RNA, 23 nt, synthetic construct
  misc_feature 1..23: note = Description of Artificial Sequence: Synthetic oligonucleotide
  source 1..23: mol_type = other RNA
atagcccacttacatttacaaac

SEQ ID NO: 433 - RNA, 23 nt, synthetic construct
  misc_feature 1..23: note = Description of Artificial Sequence: Synthetic oligonucleotide
  source 1..23: mol_type = other RNA
tgttctaacctttacatgaggac

SEQ ID NO: 434 - RNA, 23 nt, synthetic construct
  misc_feature 1..23: note = Description of Artificial Sequence: Synthetic oligonucleotide
  source 1..23: mol_type = other RNA
taacctttacatgaggactctat

SEQ ID NO: 435 - RNA, 23 nt, synthetic construct
  misc_feature 1..23: note = Description of Artificial Sequence: Synthetic oligonucleotide
  source 1..23: mol_type = other RNA
tctttaactcccattaccatgta

SEQ ID NO: 436 - RNA, 23 nt, synthetic construct
  misc_feature 1..23: note = Description of Artificial Sequence: Synthetic oligonucleotide
  source 1..23: mol_type = other RNA
actgctcaggaaacgagactttc

SEQ ID NO: 437 - RNA, 23 nt, synthetic construct
  misc_feature 1..23: note = Description of Artificial Sequence: Synthetic oligonucleotide
  source 1..23: mol_type = other RNA
gtatagttaacacactaccgaat

SEQ ID NO: 438 - RNA, 23 nt, synthetic construct
  misc_feature 1..23: note = Description of Artificial Sequence: Synthetic oligonucleotide
  source 1..23: mol_type = other RNA
tctgatgcagcttatacgaaata

SEQ ID NO: 439 - RNA, 23 nt, synthetic construct
  misc_feature 1..23: note = Description of Artificial Sequence: Synthetic oligonucleotide
  source 1..23: mol_type = other RNA
agtctgtccttgaaggactaata

SEQ ID NO: 440 - RNA, 23 nt, synthetic construct
  misc_feature 1..23: note = Description of Artificial Sequence: Synthetic oligonucleotide
  source 1..23: mol_type = other RNA
aggaaacgagactttccattaca

SEQ ID NO: 441 - RNA, 23 nt, synthetic construct
  misc_feature 1..23: note = Description of Artificial Sequence: Synthetic oligonucleotide
  source 1..23: mol_type = other RNA
gcgttcttgtaattttacacgct

SEQ ID NO: 442 - RNA, 23 nt, synthetic construct
  misc_feature 1..23: note = Description of Artificial Sequence: Synthetic oligonucleotide
  source 1..23: mol_type = other RNA
tatcctttcatatagttagctaa

SEQ ID NO: 443 - RNA, 23 nt, synthetic construct
  misc_feature 1..23: note = Description of Artificial Sequence: Synthetic oligonucleotide
  source 1..23: mol_type = other RNA
tgaaagtctgtccttgaaggact

SEQ ID NO: 444 - RNA, 23 nt, synthetic construct
  misc_feature 1..23: note = Description of Artificial Sequence: Synthetic oligonucleotide
  source 1..23: mol_type = other RNA
ctgtccttgaaggactaatagaa

SEQ ID NO: 445 - RNA, 23 nt, synthetic construct
  misc_feature 1..23: note = Description of Artificial Sequence: Synthetic oligonucleotide
  source 1..23: mol_type = other RNA
agcgttcttgtaattttacacgc

SEQ ID NO: 446 - RNA, 23 nt, synthetic construct
  misc_feature 1..23: note = Description of Artificial Sequence: Synthetic oligonucleotide
  source 1..23: mol_type = other RNA
tttgtatagttaacacactaccg

SEQ ID NO: 447 - RNA, 23 nt, synthetic construct
  misc_feature 1..23: note = Description of Artificial Sequence: Synthetic oligonucleotide
  source 1..23: mol_type = other RNA
tgaggactctattctttaactcc

SEQ ID NO: 448 - RNA, 23 nt, synthetic construct
  misc_feature 1..23: note = Description of Artificial Sequence: Synthetic oligonucleotide
  source 1..23: mol_type = other RNA
cttgtaattttacacgcttttgt

SEQ ID NO: 449 - RNA, 23 nt, synthetic construct
  misc_feature 1..23: note = Description of Artificial Sequence: Synthetic oligonucleotide
  source 1..23: mol_type = other RNA
tgagtcctggatgatactaataa

SEQ ID NO: 450 - RNA, 23 nt, synthetic construct
  misc_feature 1..23: note = Description of Artificial Sequence: Synthetic oligonucleotide
  source 1..23: mol_type = other RNA
tgtatagttaacacactaccgaa

SEQ ID NO: 451 - RNA, 23 nt, synthetic construct
  misc_feature 1..23: note = Description of Artificial Sequence: Synthetic oligonucleotide
  source 1..23: mol_type = other RNA
ccaaaatcttgatcagttaagaa

SEQ ID NO: 452 - RNA, 23 nt, synthetic construct
  misc_feature 1..23: note = Description of Artificial Sequence: Synthetic oligonucleotide
  source 1..23: mol_type = other RNA
ctactcaaagcatgggattatta

SEQ ID NO: 453 - RNA, 23 nt, synthetic construct
  misc_feature 1..23: note = Description of Artificial Sequence: Synthetic oligonucleotide
  source 1..23: mol_type = other RNA
actcccattaccatgtaatggca

SEQ ID NO: 454 - RNA, 23 nt, synthetic construct
  misc_feature 1..23: note = Description of Artificial Sequence: Synthetic oligonucleotide
  source 1..23: mol_type = other RNA
tttttgttgacattagtctcagt

SEQ ID NO: 455 - RNA, 23 nt, synthetic construct
  misc_feature 1..23: note = Description of Artificial Sequence: Synthetic oligonucleotide
  source 1..23: mol_type = other RNA
ctgagtcctggatgatactaata

SEQ ID NO: 456 - RNA, 23 nt, synthetic construct
  misc_feature 1..23: note = Description of Artificial Sequence: Synthetic oligonucleotide
  source 1..23: mol_type = other RNA
tgtttttaaactgtacagtgtct

SEQ ID NO: 457 - RNA, 23 nt, synthetic construct
  misc_feature 1..23: note = Description of Artificial Sequence: Synthetic oligonucleotide
  source 1..23: mol_type = other RNA
ttttgtatagttaacacactacc

SEQ ID NO: 458 - RNA, 23 nt, synthetic construct
  misc_feature 1..23: note = Description of Artificial Sequence: Synthetic oligonucleotide
  source 1..23: mol_type = other RNA
agttaacacactaccgaatgtgt

SEQ ID NO: 459 - RNA, 23 nt, synthetic construct
  misc_feature 1..23: note = Description of Artificial Sequence: Synthetic oligonucleotide
  source 1..23: mol_type = other RNA
aagttaagttgagatagttttca

SEQ ID NO: 460 - RNA, 23 nt, synthetic construct
  misc_feature 1..23: note = Description of Artificial Sequence: Synthetic oligonucleotide
  source 1..23: mol_type = other RNA
tatgaaaatgctggctatagatg

SEQ ID NO: 461 - RNA, 23 nt, synthetic construct
  misc_feature 1..23: note = Description of Artificial Sequence: Synthetic oligonucleotide
  source 1..23: mol_type = other RNA
tcaggaggaatactgaacatctg

SEQ ID NO: 462 - RNA, 23 nt, synthetic construct
  misc_feature 1..23: note = Description of Artificial Sequence: Synthetic oligonucleotide
  source 1..23: mol_type = other RNA
tttttgtatagttaacacactac

SEQ ID NO: 463 - RNA, 23 nt, synthetic construct
  misc_feature 1..23: note = Description of Artificial Sequence: Synthetic oligonucleotide
  source 1..23: mol_type = other RNA
aaaagtatgttctaacctttaca

SEQ ID NO: 464 - RNA, 23 nt, synthetic construct
  misc_feature 1..23: note = Description of Artificial Sequence: Synthetic oligonucleotide
  source 1..23: mol_type = other RNA
tttaattaattgggccagctttt

SEQ ID NO: 465 - RNA, 23 nt, synthetic construct
  misc_feature 1..23: note = Description of Artificial Sequence: Synthetic oligonucleotide
  source 1..23: mol_type = other RNA
ctcaaagcatgggattattagaa

SEQ ID NO: 466 - RNA, 23 nt, synthetic construct
  misc_feature 1..23: note = Description of Artificial Sequence: Synthetic oligonucleotide
  source 1..23: mol_type = other RNA
gtctgtccttgaaggactaatag

SEQ ID NO: 467 - RNA, 23 nt, synthetic construct
  misc_feature 1..23: note = Description of Artificial Sequence: Synthetic oligonucleotide
  source 1..23: mol_type = other RNA
attaccatgtaatggcagttata

SEQ ID NO: 468 - RNA, 23 nt, synthetic construct
  misc_feature 1..23: note = Description of Artificial Sequence: Synthetic oligonucleotide
  source 1..23: mol_type = other RNA
tctaaatatggactgctcaggaa

SEQ ID NO: 469 - RNA, 23 nt, synthetic construct
  misc_feature 1..23: note = Description of Artificial Sequence: Synthetic oligonucleotide
  source 1..23: mol_type = other RNA
ttgtatagttaacacactaccga

SEQ ID NO: 470 - RNA, 23 nt, synthetic construct
  misc_feature 1..23: note = Description of Artificial Sequence: Synthetic oligonucleotide
  source 1..23: mol_type = other RNA
cctttacatgaggactctattct

SEQ ID NO: 471 - RNA, 23 nt, synthetic construct
  misc_feature 1..23: note = Description of Artificial Sequence: Synthetic oligonucleotide
  source 1..23: mol_type = other RNA
taactcccattaccatgtaatgg

SEQ ID NO: 472 - RNA, 23 nt, synthetic construct
  misc_feature 1..23: note = Description of Artificial Sequence: Synthetic oligonucleotide
  source 1..23: mol_type = other RNA
ataaaaagcttttgtctacacac

SEQ ID NO: 473 - RNA, 23 nt, synthetic construct
  misc_feature 1..23: note = Description of Artificial Sequence: Synthetic oligonucleotide
  source 1..23: mol_type = other RNA
agatagttttcatccataactga

SEQ ID NO: 474 - RNA, 23 nt, synthetic construct
  misc_feature 1..23: note = Description of Artificial Sequence: Synthetic oligonucleotide
  source 1..23: mol_type = other RNA
catgggattattagaatcaaaca

SEQ ID NO: 475 - RNA, 23 nt, synthetic construct
  misc_feature 1..23: note = Description of Artificial Sequence: Synthetic oligonucleotide
  source 1..23: mol_type = other RNA
aggggaagctagtcttttgcttt

SEQ ID NO: 476 - RNA, 23 nt, synthetic construct
  misc_feature 1..23: note = Description of Artificial Sequence: Synthetic oligonucleotide
  source 1..23: mol_type = other RNA
ttaagttgagatagttttcatcc

SEQ ID NO: 477 - RNA, 23 nt, synthetic construct
  misc_feature 1..23: note = Description of Artificial Sequence: Synthetic oligonucleotide
  source 1..23: mol_type = other RNA
gttaagaaatttcacatagccca

SEQ ID NO: 478 - RNA, 23 nt, synthetic construct
  misc_feature 1..23: note = Description of Artificial Sequence: Synthetic oligonucleotide
  source 1..23: mol_type = other RNA
tttttaattaattgggccagctt

SEQ ID NO: 479 - RNA, 23 nt, synthetic construct
  misc_feature 1..23: note = Description of Artificial Sequence: Synthetic oligonucleotide
  source 1..23: mol_type = other RNA
ggttttcgagattatcgttttct

SEQ ID NO: 480 - RNA, 23 nt, synthetic construct
  misc_feature 1..23: note = Description of Artificial Sequence: Synthetic oligonucleotide
  source 1..23: mol_type = other RNA
tcaatctactcaaagcatgggat

SEQ ID NO: 481 - RNA, 23 nt, synthetic construct
  misc_feature 1..23: note = Description of Artificial Sequence: Synthetic oligonucleotide
  source 1..23: mol_type = other RNA
atatggactgctcaggaaacgag

SEQ ID NO: 482 - RNA, 23 nt, synthetic construct
  misc_feature 1..23: note = Description of Artificial Sequence: Synthetic oligonucleotide
  source 1..23: mol_type = other RNA
acatctgagtcctggatgatact

SEQ ID NO: 483 - RNA, 23 nt, synthetic construct
  misc_feature 1..23: note = Description of Artificial Sequence: Synthetic oligonucleotide
  source 1..23: mol_type = other RNA
tgtctctgatgcagcttatacga

SEQ ID NO: 484 - RNA, 23 nt, synthetic construct
  misc_feature 1..23: note = Description of Artificial Sequence: Synthetic oligonucleotide
  source 1..23: mol_type = other RNA
tgtaatggcagttatattttgca

SEQ ID NO: 485 - RNA, 23 nt, synthetic construct
  misc_feature 1..23: note = Description of Artificial Sequence: Synthetic oligonucleotide
  source 1..23: mol_type = other RNA
atggactgctcaggaaacgagac

SEQ ID NO: 486 - RNA, 23 nt, synthetic construct
  misc_feature 1..23: note = Description of Artificial Sequence: Synthetic oligonucleotide
  source 1..23: mol_type = other RNA
ttgtgcaaacttgtcgggaggag

SEQ ID NO: 487 - RNA, 21 nt, synthetic construct
  misc_feature 1..21: note = Description of Artificial Sequence: Synthetic oligonucleotide
  source 1..21: mol_type = other RNA
  modified_base 1: mod_base = OTHER; note = 2'-O-methylguanosine-3'-phosphorothioate
  modified_base 2: mod_base = OTHER; note = 2'-O-methyluridine-3'-phosphorothioate
  modified_base 3: mod_base = OTHER; note = 2'-O-methyladenosine-3'-phosphate
  modified_base 4: mod_base = OTHER; note = 2'-O-methyladenosine-3'-phosphate
  modified_base 5: mod_base = OTHER; note = 2'-O-methylguanosine-3'-phosphate
  modified_base 6: mod_base = OTHER; note = 2'-O-methyladenosine-3'-phosphate
  modified_base 7: mod_base = OTHER; note = 2'-fluorouridine-3'-phosphate
  modified_base 8: mod_base = OTHER; note = 2'-O-methyluridine-3'-phosphate
  modified_base 9: mod_base = OTHER; note = 2'-fluorouridine-3'-phosphate
  modified_base 10: mod_base = OTHER; note = 2'-fluoroguanosine-3'-phosphate
  modified_base 11: mod_base = OTHER; note = 2'-fluorouridine-3'-phosphate
  modified_base 12: mod_base = OTHER; note = 2'-O-methyluridine-3'-phosphate
  modified_base 13: mod_base = OTHER; note = 2'-O-methyluridine-3'-phosphate
  modified_base 14: mod_base = OTHER; note = 2'-O-methyluridine-3'-phosphate
  modified_base 15: mod_base = OTHER; note = 2'-O-methyluridine-3'-phosphate
  modified_base 16: mod_base = OTHER; note = 2'-O-methyladenosine-3'-phosphate
  modified_base 17: mod_base = OTHER; note = 2'-O-methyladenosine-3'-phosphate
  modified_base 18: mod_base = OTHER; note = 2'-O-methyladenosine-3'-phosphate
  modified_base 19: mod_base = OTHER; note = 2'-O-methylcytidine-3'-phosphate
  modified_base 20: mod_base = OTHER; note = 2'-O-methyluridine-3'-phosphate
  modified_base 21: mod_base = OTHER; note = 2'-O-methyladenosine-3'-phosphate attached to N-[tris(N-acetylgalactosamine-alkyl)-amidodecanoyl)]-4-hydr oxyprolinol (Hyp-(GalNAc-alkyl)3)
gtaagatttgtttttaaacta

SEQ ID NO: 488 - RNA, 23 nt, synthetic construct
  misc_feature 1..23: note = Description of Artificial Sequence: Synthetic oligonucleotide
  source 1..23: mol_type = other RNA
  modified_base 1: mod_base = OTHER; note = Vinylphosphonate 2'-O-methyluridine-3'-phosphorothioate
  modified_base 2: mod_base = OTHER; note = 2'-fluoroadenosine-3'-phosphorothioate
  modified_base 3: mod_base = OTHER; note = 2'-O-methylguanosine-3'-phosphate
  modified_base 4: mod_base = OTHER; note = 2'-O-methyluridine-3'-phosphate
  modified_base 5: mod_base = OTHER; note = 2'-O-methyluridine-3'-phosphate
  modified_base 6: mod_base = OTHER; note = 2'-fluorouridine-3'-phosphate
  modified_base 7: mod_base = OTHER; note = 2'-O-methyladenosine-3'-phosphate
  modified_base 8: mod_base = OTHER; note = 2'-fluoroadenosine-3'-phosphate
  modified_base 9: mod_base = OTHER; note = 2'-fluoroadenosine-3'-phosphate
  modified_base 10: mod_base = OTHER; note = 2'-O-methyladenosine-3'-phosphate
  modified_base 11: mod_base = OTHER; note = 2'-O-methyladenosine-3'-phosphate
  modified_base 12: mod_base = OTHER; note = 2'-O-methylcytidine-3'-phosphate
  modified_base 13: mod_base = OTHER; note = 2'-O-methyladenosine-3'-phosphate
  modified_base 14: mod_base = OTHER; note = 2'-fluoroadenosine-3'-phosphate
  modified_base 15: mod_base = OTHER; note = 2'-O-methyladenosine-3'-phosphate
  modified_base 16: mod_base = OTHER; note = 2'-fluorouridine-3'-phosphate
  modified_base 17: mod_base = OTHER; note = 2'-O-methylcytidine-3'-phosphate
  modified_base 18: mod_base = OTHER; note = 2'-O-methyluridine-3'-phosphate
  modified_base 19: mod_base = OTHER; note = 2'-O-methyluridine-3'-phosphate
  modified_base 20: mod_base = OTHER; note = 2'-O-methyladenosine-3'-phosphate
  modified_base 21: mod_base = OTHER; note = 2'-O-methylcytidine-3'-phosphorothioate
  modified_base 22: mod_base = OTHER; note = 2'-O-methyladenosine-3'-phosphorothioate
  modified_base 23: mod_base = OTHER; note = 2'-O-methylcytidine-3'-phosphate
tagtttaaaaacaaatcttacac

SEQ ID NO: 489 - RNA, 21 nt, synthetic construct
  misc_feature 1..21: note = Description of Artificial Sequence: Synthetic oligonucleotide
  source 1..21: mol_type = other RNA
  modified_base 1: mod_base = OTHER; note = 2'-O-methyladenosine-3'-phosphorothioate
  modified_base 2: mod_base = OTHER; note = 2'-O-methylcytidine-3'-phosphorothioate
  modified_base 3: mod_base = OTHER; note = 2'-O-methylguanosine-3'-phosphate
  modified_base 4: mod_base = OTHER; note = 2'-O-methyladenosine-3'-phosphate
  modified_base 5: mod_base = OTHER; note = 2'-O-methyladenosine-3'-phosphate
  modified_base 6: mod_base = OTHER; note = 2'-O-methylguanosine-3'-phosphate
  modified_base 7: mod_base = OTHER; note = 2'-fluoroadenosine-3'-phosphate
  modified_base 8: mod_base = OTHER; note = 2'-O-methyluridine-3'-phosphate
  modified_base 9: mod_base = OTHER; note = 2'-fluoroadenosine-3'-phosphate
  modified_base 10: mod_base = OTHER; note = 2'-fluoroadenosine-3'-phosphate
  modified_base 11: mod_base = OTHER; note = 2'-fluorouridine-3'-phosphate
  modified_base 12: mod_base = OTHER; note = 2'-O-methyluridine-3'-phosphate
  modified_base 13: mod_base = OTHER; note = 2'-O-methylguanosine-3'-phosphate
  modified_base 14: mod_base = OTHER; note = 2'-O-methyluridine-3'-phosphate
  modified_base 15: mod_base = OTHER; note = 2'-O-methyluridine-3'-phosphate
  modified_base 16: mod_base = OTHER; note = 2'-O-methylguanosine-3'-phosphate
  modified_base 17: mod_base = OTHER; note = 2'-O-methyluridine-3'-phosphate
  modified_base 18: mod_base = OTHER; note = 2'-O-methyluridine-3'-phosphate
  modified_base 19: mod_base = OTHER; note = 2'-O-methylcytidine-3'-phosphate
  modified_base 20: mod_base = OTHER; note = 2'-O-methyluridine-3'-phosphate
  modified_base 21: mod_base = OTHER; note = 2'-O-methyladenosine-3'-phosphate attached to N-[tris(N-acetylgalactosamine-alkyl)-amidodecanoyl)]-4-hydr oxyprolinol (Hyp-(GalNAc-alkyl)3)
acgaagataattgttgttcta

SEQ ID NO: 490 - RNA, 23 nt, synthetic construct
  misc_feature 1..23: note = Description of Artificial Sequence: Synthetic oligonucleotide
  source 1..23: mol_type = other RNA
  modified_base 1: mod_base = OTHER; note = Vinylphosphonate 2'-O-methyluridine-3'-phosphorothioate
  modified_base 2: mod_base = OTHER; note = 2'-fluoroadenosine-3'-phosphorothioate
  modified_base 3: mod_base = OTHER; note = 2'-O-methylguanosine-3'-phosphate
  modified_base 4: mod_base = OTHER; note = 2'-O-methyladenosine-3'-phosphate
  modified_base 5: mod_base = OTHER; note = 2'-O-methyladenosine-3'-phosphate
  modified_base 6: mod_base = OTHER; note = 2'-fluorocytidine-3'-phosphate
  modified_base 7: mod_base = OTHER; note = 2'-O-methyladenosine-3'-phosphate
  modified_base 8: mod_base = OTHER; note = 2'-fluoroadenosine-3'-phosphate
  modified_base 9: mod_base = OTHER; note = 2'-fluorocytidine-3'-phosphate
  modified_base 10: mod_base = OTHER; note = 2'-O-methyladenosine-3'-phosphate
  modified_base 11: mod_base = OTHER; note = 2'-O-methyladenosine-3'-phosphate
  modified_base 12: mod_base = OTHER; note = 2'-O-methyluridine-3'-phosphate
  modified_base 13: mod_base = OTHER; note = 2'-O-methyluridine-3'-phosphate
  modified_base 14: mod_base = OTHER; note = 2'-fluoroadenosine-3'-phosphate
  modified_base 15: mod_base = OTHER; note = 2'-O-methyluridine-3'-phosphate
  modified_base 16: mod_base = OTHER; note = 2'-fluorocytidine-3'-phosphate
  modified_base 17: mod_base = OTHER; note = 2'-O-methyluridine-3'-phosphate
  modified_base 18: mod_base = OTHER; note = 2'-O-methyluridine-3'-phosphate
  modified_base 19: mod_base = OTHER; note = 2'-O-methylcytidine-3'-phosphate
  modified_base 20: mod_base = OTHER; note = 2'-O-methylguanosine-3'-phosphate
  modified_base 21: mod_base = OTHER; note = 2'-O-methyluridine-3'-phosphorothioate
  modified_base 22: mod_base = OTHER; note = 2'-O-methyladenosine-3'-phosphorothioate
  modified_base 23: mod_base = OTHER; note = 2'-O-methyluridine-3'-phosphate
tagaacaacaattatcttcgtat

SEQ ID NO: 491 - RNA, 21 nt, synthetic construct
  misc_feature 1..21: note = Description of Artificial Sequence: Synthetic oligonucleotide
  source 1..21: mol_type = other RNA
  modified_base 1: mod_base = OTHER; note = 2'-O-methylcytidine-3'-phosphorothioate
  modified_base 2: mod_base = OTHER; note = 2'-O-methyladenosine-3'-phosphorothioate
  modified_base 3: mod_base = OTHER; note = 2'-O-methyluridine-3'-phosphate
  modified_base 4: mod_base = OTHER; note = 2'-O-methylcytidine-3'-phosphate
  modified_base 5: mod_base = OTHER; note = 2'-O-methylcytidine-3'-phosphate
  modified_base 6: mod_base = OTHER; note = 2'-O-methylcytidine-3'-phosphate
  modified_base 7: mod_base = OTHER; note = 2'-fluorouridine-3'-phosphate
  modified_base 8: mod_base = OTHER; note = 2'-O-methyladenosine-3'-phosphate
  modified_base 9: mod_base = OTHER; note = 2'-fluoroadenosine-3'-phosphate
  modified_base 10: mod_base = OTHER; note = 2'-fluorouridine-3'-phosphate
  modified_base 11: mod_base = OTHER; note = 2'-fluorocytidine-3'-phosphate
  modified_base 12: mod_base = OTHER; note = 2'-O-methyluridine-3'-phosphate
  modified_base 13: mod_base = OTHER; note = 2'-O-methyladenosine-3'-phosphate
  modified_base 14: mod_base = OTHER; note = 2'-O-methyluridine-3'-phosphate
  modified_base 15: mod_base = OTHER; note = 2'-O-methyladenosine-3'-phosphate
  modified_base 16: mod_base = OTHER; note = 2'-O-methylcytidine-3'-phosphate
  modified_base 17: mod_base = OTHER; note = 2'-O-methyladenosine-3'-phosphate
  modified_base 18: mod_base = OTHER; note = 2'-O-methyluridine-3'-phosphate
  modified_base 19: mod_base = OTHER; note = 2'-O-methyladenosine-3'-phosphate
  modified_base 20: mod_base = OTHER; note = 2'-O-methyluridine-3'-phosphate
  modified_base 21: mod_base = OTHER; note = 2'-O-methyladenosine-3'-phosphate attached to N-[tris(N-acetylgalactosamine-alkyl)-amidodecanoyl)]-4-hydr oxyprolinol (Hyp-(GalNAc-alkyl)3)
catccctaatctatacatata

SEQ ID NO: 492 - RNA, 23 nt, synthetic construct
  misc_feature 1..23: note = Description of Artificial Sequence: Synthetic oligonucleotide
  source 1..23: mol_type = other RNA
  modified_base 1: mod_base = OTHER; note = Vinylphosphonate 2'-O-methyluridine-3'-phosphorothioate
  modified_base 2: mod_base = OTHER; note = 2'-fluoroadenosine-3'-phosphorothioate
  modified_base 3: mod_base = OTHER; note = 2'-O-methyluridine-3'-phosphate
  modified_base 4: mod_base = OTHER; note = 2'-O-methyladenosine-3'-phosphate
  modified_base 5: mod_base = OTHER; note = 2'-O-methyluridine-3'-phosphate
  modified_base 6: mod_base = OTHER; note = 2'-fluoroguanosine-3'-phosphate
  modified_base 7: mod_base = OTHER; note = 2'-O-methyluridine-3'-phosphate
  modified_base 8: mod_base = OTHER; note = 2'-fluoroadenosine-3'-phosphate
  modified_base 9: mod_base = OTHER; note = 2'-fluorouridine-3'-phosphate
  modified_base 10: mod_base = OTHER; note = 2'-O-methyladenosine-3'-phosphate
  modified_base 11: mod_base = OTHER; note = 2'-O-methylguanosine-3'-phosphate
  modified_base 12: mod_base = OTHER; note = 2'-O-methyladenosine-3'-phosphate
  modified_base 13: mod_base = OTHER; note = 2'-O-methyluridine-3'-phosphate
  modified_base 14: mod_base = OTHER; note = 2'-fluorouridine-3'-phosphate
  modified_base 15: mod_base = OTHER; note = 2'-O-methyladenosine-3'-phosphate
  modified_base 16: mod_base = OTHER; note = 2'-fluoroguanosine-3'-phosphate
  modified_base 17: mod_base = OTHER; note = 2'-O-methylguanosine-3'-phosphate
  modified_base 18: mod_base = OTHER; note = 2'-O-methylguanosine-3'-phosphate
  modified_base 19: mod_base = OTHER; note = 2'-O-methyladenosine-3'-phosphate
  modified_base 20: mod_base = OTHER; note = 2'-O-methyluridine-3'-phosphate
  modified_base 21: mod_base = OTHER; note = 2'-O-methylguanosine-3'-phosphorothioate
  modified_base 22: mod_base = OTHER; note = 2'-O-methylcytidine-3'-phosphorothioate
  modified_base 23: mod_base = OTHER; note = 2'-O-methyluridine-3'-phosphate
tatatgtatagattagggatgct

SEQ ID NO: 493 - RNA, 21 nt, synthetic construct
  misc_feature 1..21: note = Description of Artificial Sequence: Synthetic oligonucleotide
  source 1..21: mol_type = other RNA
  modified_base 1: mod_base = OTHER; note = 2'-O-methyluridine-3'-phosphorothioate
  modified_base 2: mod_base = OTHER; note = 2'-O-methylguanosine-3'-phosphorothioate
  modified_base 3: mod_base = OTHER; note = 2'-O-methylguanosine-3'-phosphate
  modified_base 4: mod_base = OTHER; note = 2'-O-methyladenosine-3'-phosphate
  modified_base 5: mod_base = OTHER; note = 2'-O-methylguanosine-3'-phosphate
  modified_base 6: mod_base = OTHER; note = 2'-O-methyluridine-3'-phosphate
  modified_base 7: mod_base = OTHER; note = 2'-fluoroguanosine-3'-phosphate
  modified_base 8: mod_base = OTHER; note = 2'-O-methylcytidine-3'-phosphate
  modified_base 9: mod_base = OTHER; note = 2'-fluorouridine-3'-phosphate
  modified_base 10: mod_base = OTHER; note = 2'-fluoroguanosine-3'-phosphate
  modified_base 11: mod_base = OTHER; note = 2'-fluorouridine-3'-phosphate
  modified_base 12: mod_base = OTHER; note = 2'-O-methyluridine-3'-phosphate
  modified_base 13: mod_base = OTHER; note = 2'-O-methyladenosine-3'-phosphate
  modified_base 14: mod_base = OTHER; note = 2'-O-methyluridine-3'-phosphate
  modified_base 15: mod_base = OTHER; note = 2'-O-methyladenosine-3'-phosphate
  modified_base 16: mod_base = OTHER; note = 2'-O-methyluridine-3'-phosphate
  modified_base 17: mod_base = OTHER; note = 2'-O-methyladenosine-3'-phosphate
  modified_base 18: mod_base = OTHER; note = 2'-O-methyladenosine-3'-phosphate
  modified_base 19: mod_base = OTHER; note = 2'-O-methyluridine-3'-phosphate
  modified_base 20: mod_base = OTHER; note = 2'-O-methyluridine-3'-phosphate
  modified_base 21: mod_base = OTHER; note = 2'-O-methyladenosine-3'-phosphate attached to N-[tris(N-acetylgalactosamine-alkyl)-amidodecanoyl)]-4-hydr oxyprolinol (Hyp-(GalNAc-alkyl)3)
tggagtgctgttatataatta

SEQ ID NO: 494 - RNA, 23 nt, synthetic construct
  misc_feature 1..23: note = Description of Artificial Sequence: Synthetic oligonucleotide
  source 1..23: mol_type = other RNA
  modified_base 1: mod_base = OTHER; note = Vinylphosphonate 2'-O-methyluridine-3'-phosphorothioate
  modified_base 2: mod_base = OTHER; note = 2'-fluoroadenosine-3'-phosphorothioate
  modified_base 3: mod_base = OTHER; note = 2'-O-methyladenosine-3'-phosphate
  modified_base 4: mod_base = OTHER; note = 2'-O-methyluridine-3'-phosphate
  modified_base 5: mod_base = OTHER; note = 2'-O-methyluridine-3'-phosphate
  modified_base 6: mod_base = OTHER; note = 2'-fluoroadenosine-3'-phosphate
  modified_base 7: mod_base = OTHER; note = 2'-O-methyluridine-3'-phosphate
  modified_base 8: mod_base = OTHER; note = 2'-fluoroadenosine-3'-phosphate
  modified_base 9: mod_base = OTHER; note = 2'-fluorouridine-3'-phosphate
  modified_base 10: mod_base = OTHER; note = 2'-O-methyladenosine-3'-phosphate
  modified_base 11: mod_base = OTHER; note = 2'-O-methyladenosine-3'-phosphate
  modified_base 12: mod_base = OTHER; note = 2'-O-methylcytidine-3'-phosphate
  modified_base 13: mod_base = OTHER; note = 2'-O-methyladenosine-3'-phosphate
  modified_base 14: mod_base = OTHER; note = 2'-fluoroguanosine-3'-phosphate
  modified_base 15: mod_base = OTHER; note = 2'-O-methylcytidine-3'-phosphate
  modified_base 16: mod_base = OTHER; note = 2'-fluoroadenosine-3'-phosphate
  modified_base 17: mod_base = OTHER; note = 2'-O-methylcytidine-3'-phosphate
  modified_base 18: mod_base = OTHER; note = 2'-O-methyluridine-3'-phosphate
  modified_base 19: mod_base = OTHER; note = 2'-O-methylcytidine-3'-phosphate
  modified_base 20: mod_base = OTHER; note = 2'-O-methylcytidine-3'-phosphate
  modified_base 21: mod_base = OTHER; note = 2'-O-methyladenosine-3'-phosphorothioate
  modified_base 22: mod_base = OTHER; note = 2'-O-methyluridine-3'-phosphorothioate
  modified_base 23: mod_base = OTHER; note = 2'-O-methylcytidine-3'-phosphate
taattatataacagcactccatc

SEQ ID NO: 495 - RNA, 21 nt, synthetic construct
  misc_feature 1..21: note = Description of Artificial Sequence: Synthetic oligonucleotide
  source 1..21: mol_type = other RNA
  modified_base 1: mod_base = OTHER; note = 2'-O-methylguanosine-3'-phosphorothioate
  modified_base 2: mod_base = OTHER; note = 2'-O-methylcytidine-3'-phosphorothioate
  modified_base 3: mod_base = OTHER; note = 2'-O-methyladenosine-3'-phosphate
  modified_base 4: mod_base = OTHER; note = 2'-O-methylcytidine-3'-phosphate
  modified_base 5: mod_base = OTHER; note = 2'-O-methyladenosine-3'-phosphate
  modified_base 6: mod_base = OTHER; note = 2'-O-methylguanosine-3'-phosphate
  modified_base 7: mod_base = OTHER; note = 2'-fluorocytidine-3'-phosphate
  modified_base 8: mod_base = OTHER; note = 2'-O-methyladenosine-3'-phosphate
  modified_base 9: mod_base = OTHER; note = 2'-fluorocytidine-3'-phosphate
  modified_base 10: mod_base = OTHER; note = 2'-fluoroadenosine-3'-phosphate
  modified_base 11: mod_base = OTHER; note = 2'-fluoroadenosine-3'-phosphate
  modified_base 12: mod_base = OTHER; note = 2'-O-methyladenosine-3'-phosphate
  modified_base 13: mod_base = OTHER; note = 2'-O-methyluridine-3'-phosphate
  modified_base 14: mod_base = OTHER; note = 2'-O-methyluridine-3'-phosphate
  modified_base 15: mod_base = OTHER; note = 2'-O-methyladenosine-3'-phosphate
  modified_base 16: mod_base = OTHER; note = 2'-O-methylguanosine-3'-phosphate
  modified_base 17: mod_base = OTHER; note = 2'-O-methyluridine-3'-phosphate
  modified_base 18: mod_base = OTHER; note = 2'-O-methyluridine-3'-phosphate
  modified_base 19: mod_base = OTHER; note = 2'-O-methyladenosine-3'-phosphate
  modified_base 20: mod_base = OTHER; note = 2'-O-methyluridine-3'-phosphate
  modified_base 21: mod_base = OTHER; note = 2'-O-methyladenosine-3'-phosphate attached to N-[tris(N-acetylgalactosamine-alkyl)-amidodecanoyl)]-4-hydr oxyprolinol (Hyp-(GalNAc-alkyl)3)
gcacagcacaaattagttata

SEQ ID NO: 496 - RNA, 23 nt, synthetic construct
  misc_feature 1..23: note = Description of Artificial Sequence: Synthetic oligonucleotide
  source 1..23: mol_type = other RNA
  modified_base 1: mod_base = OTHER; note = Vinylphosphonate 2'-O-methyluridine-3'-phosphorothioate
  modified_base 2: mod_base = OTHER; note = 2'-fluoroadenosine-3'-phosphorothioate
  modified_base 3: mod_base = OTHER; note = 2'-O-methyluridine-3'-phosphate
  modified_base 4: mod_base = OTHER; note = 2'-O-methyladenosine-3'-phosphate
  modified_base 5: mod_base = OTHER; note = 2'-O-methyladenosine-3'-phosphate
  modified_base 6: mod_base = OTHER; note = 2'-fluorocytidine-3'-phosphate
  modified_base 7: mod_base = OTHER; note = 2'-O-methyluridine-3'-phosphate
  modified_base 8: mod_base = OTHER; note = 2'-fluoroadenosine-3'-phosphate
  modified_base 9: mod_base = OTHER; note = 2'-fluoroadenosine-3'-phosphate
  modified_base 10: mod_base = OTHER; note = 2'-O-methyluridine-3'-phosphate
  modified_base 11: mod_base = OTHER; note = 2'-O-methyluridine-3'-phosphate
  modified_base 12: mod_base = OTHER; note = 2'-O-methyluridine-3'-phosphate
  modified_base 13: mod_base = OTHER; note = 2'-O-methylguanosine-3'-phosphate
  modified_base 14: mod_base = OTHER; note = 2'-fluorouridine-3'-phosphate
  modified_base 15: mod_base = OTHER; note = 2'-O-methylguanosine-3'-phosphate
  modified_base 16: mod_base = OTHER; note = 2'-fluorocytidine-3'-phosphate
  modified_base 17: mod_base = OTHER; note = 2'-O-methyluridine-3'-phosphate
  modified_base 18: mod_base = OTHER; note = 2'-O-methylguanosine-3'-phosphate
  modified_base 19: mod_base = OTHER; note = 2'-O-methyluridine-3'-phosphate
  modified_base 20: mod_base = OTHER; note = 2'-O-methylguanosine-3'-phosphate
  modified_base 21: mod_base = OTHER; note = 2'-O-methylcytidine-3'-phosphorothioate
  modified_base 22: mod_base = OTHER; note = 2'-O-methyladenosine-3'-phosphorothioate
  modified_base 23: mod_base = OTHER; note = 2'-O-methylcytidine-3'-phosphate
tataactaatttgtgctgtgcac

SEQ ID NO: 497 - RNA, 21 nt, synthetic construct
  misc_feature 1..21: note = Description of Artificial Sequence: Synthetic oligonucleotide
  source 1..21: mol_type = other RNA
  modified_base 1: mod_base = OTHER; note = 2'-O-methylcytidine-3'-phosphorothioate
  modified_base 2: mod_base = OTHER; note = 2'-O-methyluridine-3'-phosphorothioate
  modified_base 3: mod_base = OTHER; note = 2'-O-methylguanosine-3'-phosphate
  modified_base 4: mod_base = OTHER; note = 2'-O-methyladenosine-3'-phosphate
  modified_base 5: mod_base = OTHER; note = 2'-O-methyladenosine-3'-phosphate
  modified_base 6: mod_base = OTHER; note = 2'-O-methyluridine-3'-phosphate
  modified_base 7: mod_base = OTHER; note = 2'-fluoroguanosine-3'-phosphate
  modified_base 8: mod_base = OTHER; note = 2'-O-methylcytidine-3'-phosphate
  modified_base 9: mod_base = OTHER; note = 2'-fluorouridine-3'-phosphate
  modified_base 10: mod_base = OTHER; note = 2'-fluorouridine-3'-phosphate
  modified_base 11: mod_base = OTHER; note = 2'-fluorocytidine-3'-phosphate
  modified_base 12: mod_base = OTHER; note = 2'-O-methyluridine-3'-phosphate
  modified_base 13: mod_base = OTHER; note = 2'-O-methyladenosine-3'-phosphate
  modified_base 14: mod_base = OTHER; note = 2'-O-methyladenosine-3'-phosphate
  modified_base 15: mod_base = OTHER; note = 2'-O-methylguanosine-3'-phosphate
  modified_base 16: mod_base = OTHER; note = 2'-O-methyluridine-3'-phosphate
  modified_base 17: mod_base = OTHER; note = 2'-O-methyladenosine-3'-phosphate
  modified_base 18: mod_base = OTHER; note = 2'-O-methyladenosine-3'-phosphate
  modified_base 19: mod_base = OTHER; note = 2'-O-methyladenosine-3'-phosphate
  modified_base 20: mod_base = OTHER; note = 2'-O-methyluridine-3'-phosphate
  modified_base 21: mod_base = OTHER; note = 2'-O-methyladenosine-3'-phosphate attached to N-[tris(N-acetylgalactosamine-alkyl)-amidodecanoyl)]-4-hydr oxyprolinol (Hyp-(GalNAc-alkyl)3)
ctgaatgcttctaagtaaata

SEQ ID NO: 498 - RNA, 23 nt, synthetic construct
  misc_feature 1..23: note = Description of Artificial Sequence: Synthetic oligonucleotide
  source 1..23: mol_type = other RNA
  modified_base 1: mod_base = OTHER; note = Vinylphosphonate 2'-O-methyluridine-3'-phosphorothioate
  modified_base 2: mod_base = OTHER; note = 2'-fluoroadenosine-3'-phosphorothioate
  modified_base 3: mod_base = OTHER; note = 2'-O-methyluridine-3'-phosphate
  modified_base 4: mod_base = OTHER; note = 2'-O-methyluridine-3'-phosphate
  modified_base 5: mod_base = OTHER; note = 2'-O-methyluridine-3'-phosphate
  modified_base 6: mod_base = OTHER; note = 2'-fluoroadenosine-3'-phosphate
  modified_base 7: mod_base = OTHER; note = 2'-O-methylcytidine-3'-phosphate
  modified_base 8: mod_base = OTHER; note = 2'-fluorouridine-3'-phosphate
  modified_base 9: mod_base = OTHER; note = 2'-fluorouridine-3'-phosphate
  modified_base 10: mod_base = OTHER; note = 2'-O-methyladenosine-3'-phosphate
  modified_base 11: mod_base = OTHER; note = 2'-O-methylguanosine-3'-phosphate
  modified_base 12: mod_base = OTHER; note = 2'-O-methyladenosine-3'-phosphate
  modified_base 13: mod_base = OTHER; note = 2'-O-methyladenosine-3'-phosphate
  modified_base 14: mod_base = OTHER; note = 2'-fluoroguanosine-3'-phosphate
  modified_base 15: mod_base = OTHER; note = 2'-O-methylcytidine-3'-phosphate
  modified_base 16: mod_base = OTHER; note = 2'-fluoroadenosine-3'-phosphate
  modified_base 17: mod_base = OTHER; note = 2'-O-methyluridine-3'-phosphate
  modified_base 18: mod_base = OTHER; note = 2'-O-methyluridine-3'-phosphate
  modified_base 19: mod_base = OTHER; note = 2'-O-methylcytidine-3'-phosphate
  modified_base 20: mod_base = OTHER; note = 2'-O-methyladenosine-3'-phosphate
  modified_base 21: mod_base = OTHER; note = 2'-O-methylguanosine-3'-phosphorothioate
  modified_base 22: mod_base = OTHER; note = 2'-O-methyladenosine-3'-phosphorothioate
  modified_base 23: mod_base = OTHER; note = 2'-O-methyladenosine-3'-phosphate
tatttacttagaagcattcagaa

SEQ ID NO: 499 - RNA, 21 nt, synthetic construct
  misc_feature 1..21: note = Description of Artificial Sequence: Synthetic oligonucleotide
  source 1..21: mol_type = other RNA
gtaagatttgtttttaaacta

SEQ ID NO: 500 - RNA, 23 nt, synthetic construct
  misc_feature 1..23: note = Description of Artificial Sequence: Synthetic oligonucleotide
  source 1..23: mol_type = other RNA
tagtttaaaaacaaatcttacac

SEQ ID NO: 501 - RNA, 21 nt, synthetic construct
  misc_feature 1..21: note = Description of Artificial Sequence: Synthetic oligonucleotide
  source 1..21: mol_type = other RNA
acgaagataattgttgttcta

SEQ ID NO: 502 - RNA, 23 nt, synthetic construct
  misc_feature 1..23: note = Description of Artificial Sequence: Synthetic oligonucleotide
  source 1..23: mol_type = other RNA
tagaacaacaattatcttcgtat

SEQ ID NO: 503 - RNA, 21 nt, synthetic construct
  misc_feature 1..21: note = Description of Artificial Sequence: Synthetic oligonucleotide
  source 1..21: mol_type = other RNA
catccctaatctatacatata

SEQ ID NO: 504 - RNA, 23 nt, synthetic construct
  misc_feature 1..23: note = Description of Artificial Sequence: Synthetic oligonucleotide
  source 1..23: mol_type = other RNA
tatatgtatagattagggatgct

SEQ ID NO: 505 - RNA, 21 nt, synthetic construct
  misc_feature 1..21: note = Description of Artificial Sequence: Synthetic oligonucleotide
  source 1..21: mol_type = other RNA
tggagtgctgttatataatta

SEQ ID NO: 506 - RNA, 23 nt, synthetic construct
  misc_feature 1..23: note = Description of Artificial Sequence: Synthetic oligonucleotide
  source 1..23: mol_type = other RNA
taattatataacagcactccatc

SEQ ID NO: 507 - RNA, 21 nt, synthetic construct
  misc_feature 1..21: note = Description of Artificial Sequence: Synthetic oligonucleotide
  source 1..21: mol_type = other RNA
gcacagcacaaattagttata

SEQ ID NO: 508 - RNA, 23 nt, synthetic construct
  misc_feature 1..23: note = Description of Artificial Sequence: Synthetic oligonucleotide
  source 1..23: mol_type = other RNA
tataactaatttgtgctgtgcac

SEQ ID NO: 509 - RNA, 21 nt, synthetic construct
  misc_feature 1..21: note = Description of Artificial Sequence: Synthetic oligonucleotide
  source 1..21: mol_type = other RNA
ctgaatgcttctaagtaaata

SEQ ID NO: 510 - RNA, 23 nt, synthetic construct
  misc_feature 1..23: note = Description of Artificial Sequence: Synthetic oligonucleotide
  source 1..23: mol_type = other RNA
tatttacttagaagcattcagaa

SEQ ID NO: 511 - RNA, 21 nt, synthetic construct
  misc_feature 1..21: note = Description of Artificial Sequence: Synthetic oligonucleotide
  source 1..21: mol_type = other RNA
taagttggttctagcgcagtt

SEQ ID NO: 512 - RNA, 23 nt, synthetic construct
  misc_feature 1..23: note = Description of Artificial Sequence: Synthetic oligonucleotide
  source 1..23: mol_type = other RNA
aactgcgctagaaccaacttatt

SEQ ID NO: 513 - RNA, 21 nt, synthetic construct
  misc_feature 1..21: note = Description of Artificial Sequence: Synthetic oligonucleotide
  source 1..21: mol_type = other RNA
aagttggttctagcgcagttt

SEQ ID NO: 514 - RNA, 23 nt, synthetic construct
  misc_feature 1..23: note = Description of Artificial Sequence: Synthetic oligonucleotide
  source 1..23: mol_type = other RNA
aaactgcgctagaaccaacttat

SEQ ID NO: 515 - RNA, 21 nt, synthetic construct
  misc_feature 1..21: note = Description of Artificial Sequence: Synthetic oligonucleotide
  source 1..21: mol_type = other RNA
ttgaaatgtaaggctgtgtaa

SEQ ID NO: 516 - RNA, 23 nt, synthetic construct
  misc_feature 1..23: note = Description of Artificial Sequence: Synthetic oligonucleotide
  source 1..23: mol_type = other RNA
ttacacagccttacatttcaatt

SEQ ID NO: 517 - RNA, 21 nt, synthetic construct
  misc_feature 1..21: note = Description of Artificial Sequence: Synthetic oligonucleotide
  source 1..21: mol_type = other RNA
tatagttaacacactaccgaa

SEQ ID NO: 518 - RNA, 23 nt, synthetic construct
  misc_feature 1..23: note = Description of Artificial Sequence: Synthetic oligonucleotide
  source 1..23: mol_type = other RNA
ttcggtagtgtgttaactataca

SEQ ID NO: 519 - RNA, 21 nt, synthetic construct
  misc_feature 1..21: note = Description of Artificial Sequence: Synthetic oligonucleotide
  source 1..21: mol_type = other RNA
agttaacacactaccgaatgt

SEQ ID NO: 520 - RNA, 23 nt, synthetic construct
  misc_feature 1..23: note = Description of Artificial Sequence: Synthetic oligonucleotide
  source 1..23: mol_type = other RNA
acattcggtagtgtgttaactat

SEQ ID NO: 521 - RNA, 21 nt, synthetic construct
  misc_feature 1..21: note = Description of Artificial Sequence: Synthetic oligonucleotide
  source 1..21: mol_type = other RNA
tggtattttcaatagccacta

SEQ ID NO: 522 - RNA, 23 nt, synthetic construct
  misc_feature 1..23: note = Description of Artificial Sequence: Synthetic oligonucleotide
  source 1..23: mol_type = other RNA
tagtggctattgaaaataccacc

SEQ ID NO: 523 - RNA, 21 nt, synthetic construct
  misc_feature 1..21: note = Description of Artificial Sequence: Synthetic oligonucleotide
  source 1..21: mol_type = other RNA
tctgatgcagcttatacgaaa

SEQ ID NO: 524 - RNA, 23 nt, synthetic construct
  misc_feature 1..23: note = Description of Artificial Sequence: Synthetic oligonucleotide
  source 1..23: mol_type = other RNA
tttcgtataagctgcatcagaga

SEQ ID NO: 525 - RNA, 21 nt, synthetic construct
  misc_feature 1..21: note = Description of Artificial Sequence: Synthetic oligonucleotide
  source 1..21: mol_type = other RNA
  modified_base 1: mod_base = OTHER; note = 2'-O-methyluridine-3'-phosphorothioate
  modified_base 2: mod_base = OTHER; note = 2'-O-methyladenosine-3'-phosphorothioate
  modified_base 3: mod_base = OTHER; note = 2'-O-methyladenosine-3'-phosphate
  modified_base 4: mod_base = OTHER; note = 2'-O-methylguanosine-3'-phosphate
  modified_base 5: mod_base = OTHER; note = 2'-O-methyluridine-3'-phosphate
  modified_base 6: mod_base = OTHER; note = 2'-O-methyluridine-3'-phosphate
  modified_base 7: mod_base = OTHER; note = 2'-fluoroguanosine-3'-phosphate
  modified_base 8: mod_base = OTHER; note = 2'-O-methylguanosine-3'-phosphate
  modified_base 9: mod_base = OTHER; note = 2'-fluorouridine-3'-phosphate
  modified_base 10: mod_base = OTHER; note = 2'-fluorouridine-3'-phosphate
  modified_base 11: mod_base = OTHER; note = 2'-fluorocytidine-3'-phosphate
  modified_base 12: mod_base = OTHER; note = 2'-O-methyluridine-3'-phosphate
  modified_base 13: mod_base = OTHER; note = 2'-O-methyladenosine-3'-phosphate
  modified_base 14: mod_base = OTHER; note = 2'-O-methylguanosine-3'-phosphate
  modified_base 15: mod_base = OTHER; note = 2'-O-methylcytidine-3'-phosphate
  modified_base 16: mod_base = OTHER; note = 2'-O-methylguanosine-3'-phosphate
  modified_base 17: mod_base = OTHER; note = 2'-O-methylcytidine-3'-phosphate
  modified_base 18: mod_base = OTHER; note = 2'-O-methyladenosine-3'-phosphate
  modified_base 19: mod_base = OTHER; note = 2'-O-methylguanosine-3'-phosphate
  modified_base 20: mod_base = OTHER; note = 2'-O-methyluridine-3'-phosphate
  modified_base 21: mod_base = OTHER; note = 2'-O-methyluridine-3'-phosphate
taagttggttctagcgcagtt

SEQ ID NO: 526 - RNA, 23 nt, synthetic construct
  misc_feature 1..23: note = Description of Artificial Sequence: Synthetic oligonucleotide
  source 1..23: mol_type = other RNA
  modified_base 1: mod_base = OTHER; note = 2'-O-methyladenosine-3'-phosphorothioate
  modified_base 2: mod_base = OTHER; note = 2'-fluoroadenosine-3'-phosphorothioate
  modified_base 3: mod_base = OTHER; note = 2'-O-methylcytidine-3'-phosphate
  modified_base 4: mod_base = OTHER; note = 2'-O-methyluridine-3'-phosphate
  modified_base 5: mod_base = OTHER; note = 2'-O-methylguanosine-3'-phosphate
  modified_base 6: mod_base = OTHER; note = 2'-O-methylcytidine-3'-phosphate
  modified_base 7: mod_base = OTHER; note = Guanosine-glycol nucleic acid (GNA)
  modified_base 8: mod_base = OTHER; note = 2'-O-methylcytidine-3'-phosphate
  modified_base 9: mod_base = OTHER; note = 2'-O-methyluridine-3'-phosphate
  modified_base 10: mod_base = OTHER; note = 2'-O-methyladenosine-3'-phosphate
  modified_base 11: mod_base = OTHER; note = 2'-O-methylguanosine-3'-phosphate
  modified_base 12: mod_base = OTHER; note = 2'-O-methyladenosine-3'-phosphate
  modified_base 13: mod_base = OTHER; note = 2'-O-methyladenosine-3'-phosphate
  modified_base 14: mod_base = OTHER; note = 2'-fluorocytidine-3'-phosphate
  modified_base 15: mod_base = OTHER; note = 2'-O-methylcytidine-3'-phosphate
  modified_base 16: mod_base = OTHER; note = 2'-fluoroadenosine-3'-phosphate
  modified_base 17: mod_base = OTHER; note = 2'-O-methyladenosine-3'-phosphate
  modified_base 18: mod_base = OTHER; note = 2'-O-methylcytidine-3'-phosphate
  modified_base 19: mod_base = OTHER; note = 2'-O-methyluridine-3'-phosphate
  modified_base 20: mod_base = OTHER; note = 2'-O-methyluridine-3'-phosphate
  modified_base 21: mod_base = OTHER; note = 2'-O-methyladenosine-3'-phosphorothioate
  modified_base 22: mod_base = OTHER; note = 2'-O-methyluridine-3'-phosphorothioate
  modified_base 23: mod_base = OTHER; note = 2'-O-methyluridine-3'-phosphate
aactgcgctagaaccaacttatt

SEQ ID NO: 527 - RNA, 21 nt, synthetic construct
  misc_feature 1..21: note = Description of Artificial Sequence: Synthetic oligonucleotide
  source 1..21: mol_type = other RNA
  modified_base 1: mod_base = OTHER; note = 2'-O-methyladenosine-3'-phosphorothioate
  modified_base 2: mod_base = OTHER; note = 2'-O-methyladenosine-3'-phosphorothioate
  modified_base 3: mod_base = OTHER; note = 2'-O-methylguanosine-3'-phosphate
  modified_base 4: mod_base = OTHER; note = 2'-O-methyluridine-3'-phosphate
  modified_base 5: mod_base = OTHER; note = 2'-O-methyluridine-3'-phosphate
  modified_base 6: mod_base = OTHER; note = 2'-O-methylguanosine-3'-phosphate
  modified_base 7: mod_base = OTHER; note = 2'-fluoroguanosine-3'-phosphate
  modified_base 8: mod_base = OTHER; note = 2'-O-methyluridine-3'-phosphate
  modified_base 9: mod_base = OTHER; note = 2'-fluorouridine-3'-phosphate
  modified_base 10: mod_base = OTHER; note = 2'-fluorocytidine-3'-phosphate
  modified_base 11: mod_base = OTHER; note = 2'-fluorouridine-3'-phosphate
  modified_base 12: mod_base = OTHER; note = 2'-O-methyladenosine-3'-phosphate
  modified_base 13: mod_base = OTHER; note = 2'-O-methylguanosine-3'-phosphate
  modified_base 14: mod_base = OTHER; note = 2'-O-methylcytidine-3'-phosphate
  modified_base 15: mod_base = OTHER; note = 2'-O-methylguanosine-3'-phosphate
  modified_base 16: mod_base = OTHER; note = 2'-O-methylcytidine-3'-phosphate
  modified_base 17: mod_base = OTHER; note = 2'-O-methyladenosine-3'-phosphate
  modified_base 18: mod_base = OTHER; note = 2'-O-methylguanosine-3'-phosphate
  modified_base 19: mod_base = OTHER; note = 2'-O-methyluridine-3'-phosphate
  modified_base 20: mod_base = OTHER; note = 2'-O-methyluridine-3'-phosphate
  modified_base 21: mod_base = OTHER; note = 2'-O-methyluridine-3'-phosphate
aagttggttctagcgcagttt

SEQ ID NO: 528 - RNA, 23 nt, synthetic construct
  misc_feature 1..23: note = Description of Artificial Sequence: Synthetic oligonucleotide
  source 1..23: mol_type = other RNA
  modified_base 1: mod_base = OTHER; note = 2'-O-methyladenosine-3'-phosphorothioate
  modified_base 2: mod_base = OTHER; note = 2'-fluoroadenosine-3'-phosphorothioate
  modified_base 3: mod_base = OTHER; note = 2'-O-methyladenosine-3'-phosphate
  modified_base 4: mod_base = OTHER; note = 2'-O-methylcytidine-3'-phosphate
  modified_base 5: mod_base = OTHER; note = 2'-O-methyluridine-3'-phosphate
  modified_base 6: mod_base = OTHER; note = 2'-O-methylguanosine-3'-phosphate
  modified_base 7: mod_base = OTHER; note = Cytidine-glycol nucleic acid (GNA)
  modified_base 8: mod_base = OTHER; note = 2'-O-methylguanosine-3'-phosphate
  modified_base 9: mod_base = OTHER; note = 2'-O-methylcytidine-3'-phosphate
  modified_base 10: mod_base = OTHER; note = 2'-O-methyluridine-3'-phosphate
  modified_base 11: mod_base = OTHER; note = 2'-O-methyladenosine-3'-phosphate
  modified_base 12: mod_base = OTHER; note = 2'-O-methylguanosine-3'-phosphate
  modified_base 13: mod_base = OTHER; note = 2'-O-methyladenosine-3'-phosphate
  modified_base 14: mod_base = OTHER; note = 2'-fluoroadenosine-3'-phosphate
  modified_base 15: mod_base = OTHER; note = 2'-O-methylcytidine-3'-phosphate
  modified_base 16: mod_base = OTHER; note = 2'-fluorocytidine-3'-phosphate
  modified_base 17: mod_base = OTHER; note = 2'-O-methyladenosine-3'-phosphate
  modified_base 18: mod_base = OTHER; note = 2'-O-methyladenosine-3'-phosphate
  modified_base 19: mod_base = OTHER; note = 2'-O-methylcytidine-3'-phosphate
  modified_base 20: mod_base = OTHER; note = 2'-O-methyluridine-3'-phosphate
  modified_base 21: mod_base = OTHER; note = 2'-O-methyluridine-3'-phosphorothioate
  modified_base 22: mod_base = OTHER; note = 2'-O-methyladenosine-3'-phosphorothioate
  modified_base 23: mod_base = OTHER; note = 2'-O-methyluridine-3'-phosphate
aaactgcgctagaaccaacttat

SEQ ID NO: 529 - RNA, 21 nt, synthetic construct
  misc_feature 1..21: note = Description of Artificial Sequence: Synthetic oligonucleotide
  source 1..21: mol_type = other RNA
  modified_base 1: mod_base = OTHER; note = 2'-O-methyluridine-3'-phosphorothioate
  modified_base 2: mod_base = OTHER; note = 2'-O-methyluridine-3'-phosphorothioate
  modified_base 3: mod_base = OTHER; note = 2'-O-methylguanosine-3'-phosphate
  modified_base 4: mod_base = OTHER; note = 2'-O-methyladenosine-3'-phosphate
  modified_base 5: mod_base = OTHER; note = 2'-O-methyladenosine-3'-phosphate
  modified_base 6: mod_base = OTHER; note = 2'-O-methyladenosine-3'-phosphate
  modified_base 7: mod_base = OTHER; note = 2'-fluorouridine-3'-phosphate
  modified_base 8: mod_base = OTHER; note = 2'-O-methylguanosine-3'-phosphate
  modified_base 9: mod_base = OTHER; note = 2'-fluorouridine-3'-phosphate
  modified_base 10: mod_base = OTHER; note = 2'-fluoroadenosine-3'-phosphate
  modified_base 11: mod_base = OTHER; note = 2'-fluoroadenosine-3'-phosphate
  modified_base 12: mod_base = OTHER; note = 2'-O-methylguanosine-3'-phosphate
  modified_base 13: mod_base = OTHER; note = 2'-O-methylguanosine-3'-phosphate
  modified_base 14: mod_base = OTHER; note = 2'-O-methylcytidine-3'-phosphate
  modified_base 15: mod_base = OTHER; note = 2'-O-methyluridine-3'-phosphate
  modified_base 16: mod_base = OTHER; note = 2'-O-methylguanosine-3'-phosphate
  modified_base 17: mod_base = OTHER; note = 2'-O-methyluridine-3'-phosphate
  modified_base 18: mod_base = OTHER; note = 2'-O-methylguanosine-3'-phosphate
  modified_base 19: mod_base = OTHER; note = 2'-O-methyluridine-3'-phosphate
  modified_base 20: mod_base = OTHER; note = 2'-O-methyladenosine-3'-phosphate
  modified_base 21: mod_base = OTHER; note = 2'-O-methyladenosine-3'-phosphate attached to N-[tris(N-acetylgalactosamine-alkyl)-amidodecanoyl)]-4-hydr oxyprolinol (Hyp-(GalNAc-alkyl)3)
ttgaaatgtaaggctgtgtaa

SEQ ID NO: 530 - RNA, 23 nt, synthetic construct
  misc_feature 1..23: note = Description of Artificial Sequence: Synthetic oligonucleotide
  source 1..23: mol_type = other RNA
  modified_base 1: mod_base = OTHER; note = 2'-O-methyluridine-3'-phosphorothioate
  modified_base 2: mod_base = OTHER; note = 2'-fluorouridine-3'-phosphorothioate
  modified_base 3: mod_base = OTHER; note = 2'-O-methyladenosine-3'-phosphate
  modified_base 4: mod_base = OTHER; note = 2'-O-methylcytidine-3'-phosphate
  modified_base 5: mod_base = OTHER; note = 2'-O-methyladenosine-3'-phosphate
  modified_base 6: mod_base = OTHER; note = 2'-O-methylcytidine-3'-phosphate
  modified_base 7: mod_base = OTHER; note = Adenosine-glycol nucleic acid (GNA)
  modified_base 8: mod_base = OTHER; note = 2'-O-methylguanosine-3'-phosphate
  modified_base 9: mod_base = OTHER; note = 2'-O-methylcytidine-3'-phosphate
  modified_base 10: mod_base = OTHER; note = 2'-O-methylcytidine-3'-phosphate
  modified_base 11: mod_base = OTHER; note = 2'-O-methyluridine-3'-phosphate
  modified_base 12: mod_base = OTHER; note = 2'-O-methyluridine-3'-phosphate
  modified_base 13: mod_base = OTHER; note = 2'-O-methyladenosine-3'-phosphate
  modified_base 14: mod_base = OTHER; note = 2'-fluorocytidine-3'-phosphate
  modified_base 15: mod_base = OTHER; note = 2'-O-methyladenosine-3'-phosphate
  modified_base 16: mod_base = OTHER; note = 2'-fluorouridine-3'-phosphate
  modified_base 17: mod_base = OTHER; note = 2'-O-methyluridine-3'-phosphate
  modified_base 18: mod_base = OTHER; note = 2'-O-methyluridine-3'-phosphate
  modified_base 19: mod_base = OTHER; note = 2'-O-methylcytidine-3'-phosphate
  modified_base 20: mod_base = OTHER; note = 2'-O-methyladenosine-3'-phosphate
  modified_base 21: mod_base = OTHER; note = 2'-O-methyladenosine-3'-phosphorothioate
  modified_base 22: mod_base = OTHER; note = 2'-O-methyluridine-3'-phosphorothioate
  modified_base 23: mod_base = OTHER; note = 2'-O-methyluridine-3'-phosphate
ttacacagccttacatttcaatt

SEQ ID NO: 531 - RNA, 21 nt, synthetic construct
  misc_feature 1..21: note = Description of Artificial Sequence: Synthetic oligonucleotide
  source 1..21: mol_type = other RNA
  modified_base 1: mod_base = OTHER; note = 2'-O-methyluridine-3'-phosphorothioate
  modified_base 2: mod_base = OTHER; note = 2'-O-methyladenosine-3'-phosphorothioate
  modified_base 3: mod_base = OTHER; note = 2'-O-methyluridine-3'-phosphate
  modified_base 4: mod_base = OTHER; note = 2'-O-methyladenosine-3'-phosphate
  modified_base 5: mod_base = OTHER; note = 2'-O-methylguanosine-3'-phosphate
  modified_base 6: mod_base = OTHER; note = 2'-O-methyluridine-3'-phosphate
  modified_base 7: mod_base = OTHER; note = 2'-fluorouridine-3'-phosphate
  modified_base 8: mod_base = OTHER; note = 2'-O-methyladenosine-3'-phosphate
  modified_base 9: mod_base = OTHER; note = 2'-fluoroadenosine-3'-phosphate
  modified_base 10: mod_base = OTHER; note = 2'-fluorocytidine-3'-phosphate
  modified_base 11: mod_base = OTHER; note = 2'-fluoroadenosine-3'-phosphate
  modified_base 12: mod_base = OTHER; note = 2'-O-methylcytidine-3'-phosphate
  modified_base 13: mod_base = OTHER; note = 2'-O-methyladenosine-3'-phosphate
  modified_base 14: mod_base = OTHER; note = 2'-O-methylcytidine-3'-phosphate
  modified_base 15: mod_base = OTHER; note = 2'-O-methyluridine-3'-phosphate
  modified_base 16: mod_base = OTHER; note = 2'-O-methyladenosine-3'-phosphate
  modified_base 17: mod_base = OTHER; note = 2'-O-methylcytidine-3'-phosphate
  modified_base 18: mod_base = OTHER; note = 2'-O-methylcytidine-3'-phosphate
  modified_base 19: mod_base = OTHER; note = 2'-O-methylguanosine-3'-phosphate
  modified_base 20: mod_base = OTHER; note = 2'-O-methyladenosine-3'-phosphate
  modified_base 21: mod_base = OTHER; note = 2'-O-methyladenosine-3'-phosphate attached to N-[tris(N-acetylgalactosamine-alkyl)-amidodecanoyl)]-4-hydr oxyprolinol (Hyp-(GalNAc-alkyl)3)
tatagttaacacactaccgaa

SEQ ID NO: 532 - RNA, 23 nt, synthetic construct
  misc_feature 1..23: note = Description of Artificial Sequence: Synthetic oligonucleotide
  source 1..23: mol_type = other RNA
  modified_base 1: mod_base = OTHER; note = 2'-O-methyluridine-3'-phosphorothioate
  modified_base 2: mod_base = OTHER; note = 2'-fluorouridine-3'-phosphorothioate
  modified_base 3: mod_base = OTHER; note = 2'-O-methylcytidine-3'-phosphate
  modified_base 4: mod_base = OTHER; note = 2'-O-methylguanosine-3'-phosphate
  modified_base 5: mod_base = OTHER; note = 2'-O-methylguanosine-3'-phosphate
  modified_base 6: mod_base = OTHER; note = 2'-O-methyluridine-3'-phosphate
  modified_base 7: mod_base = OTHER; note = Adenosine-glycol nucleic acid (GNA)
  modified_base 8: mod_base = OTHER; note = 2'-O-methylguanosine-3'-phosphate
  modified_base 9: mod_base = OTHER; note = 2'-O-methyluridine-3'-phosphate
  modified_base 10: mod_base = OTHER; note = 2'-O-methylguanosine-3'-phosphate
  modified_base 11: mod_base = OTHER; note = 2'-O-methyluridine-3'-phosphate
  modified_base 12: mod_base = OTHER; note = 2'-O-methylguanosine-3'-phosphate
  modified_base 13: mod_base = OTHER; note = 2'-O-methyluridine-3'-phosphate
  modified_base 14: mod_base = OTHER; note = 2'-fluorouridine-3'-phosphate
  modified_base 15: mod_base = OTHER; note = 2'-O-methyladenosine-3'-phosphate
  modified_base 16: mod_base = OTHER; note = 2'-fluoroadenosine-3'-phosphate
  modified_base 17: mod_base = OTHER; note = 2'-O-methylcytidine-3'-phosphate
  modified_base 18: mod_base = OTHER; note = 2'-O-methyluridine-3'-phosphate
  modified_base 19: mod_base = OTHER; note = 2'-O-methyladenosine-3'-phosphate
  modified_base 20: mod_base = OTHER; note = 2'-O-methyluridine-3'-phosphate
  modified_base 21: mod_base = OTHER; note = 2'-O-methyladenosine-3'-phosphorothioate
  modified_base 22: mod_base = OTHER; note = 2'-O-methylcytidine-3'-phosphorothioate
  modified_base 23: mod_base = OTHER; note = 2'-O-methyladenosine-3'-phosphate
ttcggtagtgtgttaactataca

SEQ ID NO: 533 - RNA, 21 nt, synthetic construct
  misc_feature 1..21: note = Description of Artificial Sequence: Synthetic oligonucleotide
  source 1..21: mol_type = other RNA
  modified_base 1: mod_base = OTHER; note = 2'-O-methyladenosine-3'-phosphorothioate
  modified_base 2: mod_base = OTHER; note = 2'-O-methylguanosine-3'-phosphorothioate
  modified_base 3: mod_base = OTHER; note = 2'-O-methyluridine-3'-phosphate
  modified_base 4: mod_base = OTHER; note = 2'-O-methyluridine-3'-phosphate
  modified_base 5: mod_base = OTHER; note = 2'-O-methyladenosine-3'-phosphate
  modified_base 6: mod_base = OTHER; note = 2'-O-methyladenosine-3'-phosphate
  modified_base 7: mod_base = OTHER; note = 2'-fluorocytidine-3'-phosphate
  modified_base 8: mod_base = OTHER; note = 2'-O-methyladenosine-3'-phosphate
  modified_base 9: mod_base = OTHER; note = 2'-fluorocytidine-3'-phosphate
  modified_base 10: mod_base = OTHER; note = 2'-fluoroadenosine-3'-phosphate
  modified_base 11: mod_base = OTHER; note = 2'-fluorocytidine-3'-phosphate
  modified_base 12: mod_base = OTHER; note = 2'-O-methyluridine-3'-phosphate
  modified_base 13: mod_base = OTHER; note = 2'-O-methyladenosine-3'-phosphate
  modified_base 14: mod_base = OTHER; note = 2'-O-methylcytidine-3'-phosphate
  modified_base 15: mod_base = OTHER; note = 2'-O-methylcytidine-3'-phosphate
  modified_base 16: mod_base = OTHER; note = 2'-O-methylguanosine-3'-phosphate
  modified_base 17: mod_base = OTHER; note = 2'-O-methyladenosine-3'-phosphate
  modified_base 18: mod_base = OTHER; note = 2'-O-methyladenosine-3'-phosphate
  modified_base 19: mod_base = OTHER; note = 2'-O-methyluridine-3'-phosphate
  modified_base 20: mod_base = OTHER; note = 2'-O-methylguanosine-3'-phosphate
  modified_base 21: mod_base = OTHER; note = 2'-O-methyluridine-3'-phosphate attached to N-[tris(N-acetylgalactosamine-alkyl)-amidodecanoyl)]-4-hydr oxyprolinol (Hyp-(GalNAc-alkyl)3)
agttaacacactaccgaatgt

SEQ ID NO: 534 - RNA, 23 nt, synthetic construct
  misc_feature 1..23: note = Description of Artificial Sequence: Synthetic oligonucleotide
  source 1..23: mol_type = other RNA
  modified_base 1: mod_base = OTHER; note = 2'-O-methyladenosine-3'-phosphorothioate
  modified_base 2: mod_base = OTHER; note = 2'-fluorocytidine-3'-phosphorothioate
  modified_base 3: mod_base = OTHER; note = 2'-O-methyladenosine-3'-phosphate
  modified_base 4: mod_base = OTHER; note = 2'-O-methyluridine-3'-phosphate
  modified_base 5: mod_base = OTHER; note = 2'-O-methyluridine-3'-phosphate
  modified_base 6: mod_base = OTHER; note = 2'-O-methylcytidine-3'-phosphate
  modified_base 7: mod_base = OTHER; note = Guanosine-glycol nucleic acid (GNA)
  modified_base 8: mod_base = OTHER; note = 2'-O-methylguanosine-3'-phosphate
  modified_base 9: mod_base = OTHER; note = 2'-O-methyluridine-3'-phosphate
  modified_base 10: mod_base = OTHER; note = 2'-O-methyladenosine-3'-phosphate
  modified_base 11: mod_base = OTHER; note = 2'-O-methylguanosine-3'-phosphate
  modified_base 12: mod_base = OTHER; note = 2'-O-methyluridine-3'-phosphate
  modified_base 13: mod_base = OTHER; note = 2'-O-methylguanosine-3'-phosphate
  modified_base 14: mod_base = OTHER; note = 2'-fluorouridine-3'-phosphate
  modified_base 15: mod_base = OTHER; note = 2'-O-methylguanosine-3'-phosphate
  modified_base 16: mod_base = OTHER; note = 2'-fluorouridine-3'-phosphate
  modified_base 17: mod_base = OTHER; note = 2'-O-methyluridine-3'-phosphate
  modified_base 18: mod_base = OTHER; note = 2'-O-methyladenosine-3'-phosphate
  modified_base 19: mod_base = OTHER; note = 2'-O-methyladenosine-3'-phosphate
  modified_base 20: mod_base = OTHER; note = 2'-O-methylcytidine-3'-phosphate
  modified_base 21: mod_base = OTHER; note = 2'-O-methyluridine-3'-phosphorothioate
  modified_base 22: mod_base = OTHER; note = 2'-O-methyladenosine-3'-phosphorothioate
  modified_base 23: mod_base = OTHER; note = 2'-O-methyluridine-3'-phosphate
acattcggtagtgtgttaactat

SEQ ID NO: 535 - RNA, 21 nt, synthetic construct
  misc_feature 1..21: note = Description of Artificial Sequence: Synthetic oligonucleotide
  source 1..21: mol_type = other RNA
  modified_base 1: mod_base = OTHER; note = 2'-O-methyluridine-3'-phosphorothioate
  modified_base 2: mod_base = OTHER; note = 2'-O-methylguanosine-3'-phosphorothioate
  modified_base 3: mod_base = OTHER; note = 2'-O-methylguanosine-3'-phosphate
  modified_base 4: mod_base = OTHER; note = 2'-O-methyluridine-3'-phosphate
  modified_base 5: mod_base = OTHER; note = 2'-O-methyladenosine-3'-phosphate
  modified_base 6: mod_base = OTHER; note = 2'-O-methyluridine-3'-phosphate
  modified_base 7: mod_base = OTHER; note = 2'-fluorouridine-3'-phosphate
  modified_base 8: mod_base = OTHER; note = 2'-O-methyluridine-3'-phosphate
  modified_base 9: mod_base = OTHER; note = 2'-fluorouridine-3'-phosphate
  modified_base 10: mod_base = OTHER; note = 2'-fluorocytidine-3'-phosphate
  modified_base 11: mod_base = OTHER; note = 2'-fluoroadenosine-3'-phosphate
  modified_base 12: mod_base = OTHER; note = 2'-O-methyladenosine-3'-phosphate
  modified_base 13: mod_base = OTHER; note = 2'-O-methyluridine-3'-phosphate
  modified_base 14: mod_base = OTHER; note = 2'-O-methyladenosine-3'-phosphate
  modified_base 15: mod_base = OTHER; note = 2'-O-methylguanosine-3'-phosphate
  modified_base 16: mod_base = OTHER; note = 2'-O-methylcytidine-3'-phosphate
  modified_base 17: mod_base = OTHER; note = 2'-O-methylcytidine-3'-phosphate
  modified_base 18: mod_base = OTHER; note = 2'-O-methyladenosine-3'-phosphate
  modified_base 19: mod_base = OTHER; note = 2'-O-methylcytidine-3'-phosphate
  modified_base 20: mod_base = OTHER; note = 2'-O-methyluridine-3'-phosphate
  modified_base 21: mod_base = OTHER; note = 2'-O-methyladenosine-3'-phosphate attached to N-[tris(N-acetylgalactosamine-alkyl)-amidodecanoyl)]-4-hydr oxyprolinol (Hyp-(GalNAc-alkyl)3)
tggtattttcaatagccacta

SEQ ID NO: 536 - RNA, 23 nt, synthetic construct
  misc_feature 1..23: note = Description of Artificial Sequence: Synthetic oligonucleotide
  source 1..23: mol_type = other RNA
  modified_base 1: mod_base = OTHER; note = 2'-O-methyluridine-3'-phosphorothioate
  modified_base 2: mod_base = OTHER; note = 2'-fluoroadenosine-3'-phosphorothioate
  modified_base 3: mod_base = OTHER; note = 2'-O-methylguanosine-3'-phosphate
  modified_base 4: mod_base = OTHER; note = 2'-O-methyluridine-3'-phosphate
  modified_base 5: mod_base = OTHER; note = 2'-O-methylguanosine-3'-phosphate
  modified_base 6: mod_base = OTHER; note = 2'-O-methylguanosine-3'-phosphate
  modified_base 7: mod_base = OTHER; note = Cytidine-glycol nucleic acid (GNA)
  modified_base 8: mod_base = OTHER; note = 2'-O-methyluridine-3'-phosphate
  modified_base 9: mod_base = OTHER; note = 2'-O-methyladenosine-3'-phosphate
  modified_base 10: mod_base = OTHER; note = 2'-O-methyluridine-3'-phosphate
  modified_base 11: mod_base = OTHER; note = 2'-O-methyluridine-3'-phosphate
  modified_base 12: mod_base = OTHER; note = 2'-O-methylguanosine-3'-phosphate
  modified_base 13: mod_base = OTHER; note = 2'-O-methyladenosine-3'-phosphate
  modified_base 14: mod_base = OTHER; note = 2'-fluoroadenosine-3'-phosphate
  modified_base 15: mod_base = OTHER; note = 2'-O-methyladenosine-3'-phosphate
  modified_base 16: mod_base = OTHER; note = 2'-fluoroadenosine-3'-phosphate
  modified_base 17: mod_base = OTHER; note = 2'-O-methyluridine-3'-phosphate
  modified_base 18: mod_base = OTHER; note = 2'-O-methyladenosine-3'-phosphate
  modified_base 19: mod_base = OTHER; note = 2'-O-methylcytidine-3'-phosphate
  modified_base 20: mod_base = OTHER; note = 2'-O-methylcytidine-3'-phosphate
  modified_base 21: mod_base = OTHER; note = 2'-O-methyladenosine-3'-phosphorothioate
  modified_base 22: mod_base = OTHER; note = 2'-O-methylcytidine-3'-phosphorothioate
  modified_base 23: mod_base = OTHER; note = 2'-O-methylcytidine-3'-phosphate
tagtggctattgaaaataccacc

SEQ ID NO: 537 - RNA, 21 nt, synthetic construct
  misc_feature 1..21: note = Description of Artificial Sequence: Synthetic oligonucleotide
  source 1..21: mol_type = other RNA
  modified_base 1: mod_base = OTHER; note = 2'-O-methyluridine-3'-phosphorothioate
  modified_base 2: mod_base = OTHER; note = 2'-O-methylcytidine-3'-phosphorothioate
  modified_base 3: mod_base = OTHER; note = 2'-O-methyluridine-3'-phosphate
  modified_base 4: mod_base = OTHER; note = 2'-O-methylguanosine-3'-phosphate
  modified_base 5: mod_base = OTHER; note = 2'-O-methyladenosine-3'-phosphate
  modified_base 6: mod_base = OTHER; note = 2'-O-methyluridine-3'-phosphate
  modified_base 7: mod_base = OTHER; note = 2'-fluoroguanosine-3'-phosphate
  modified_base 8: mod_base = OTHER; note = 2'-O-methylcytidine-3'-phosphate
  modified_base 9: mod_base = OTHER; note = 2'-fluoroadenosine-3'-phosphate
  modified_base 10: mod_base = OTHER; note = 2'-fluoroguanosine-3'-phosphate
  modified_base 11: mod_base = OTHER; note = 2'-fluorocytidine-3'-phosphate
  modified_base 12: mod_base = OTHER; note = 2'-O-methyluridine-3'-phosphate
  modified_base 13: mod_base = OTHER; note = 2'-O-methyluridine-3'-phosphate
  modified_base 14: mod_base = OTHER; note = 2'-O-methyladenosine-3'-phosphate
  modified_base 15: mod_base = OTHER; note = 2'-O-methyluridine-3'-phosphate
  modified_base 16: mod_base = OTHER; note = 2'-O-methyladenosine-3'-phosphate
  modified_base 17: mod_base = OTHER; note = 2'-O-methylcytidine-3'-phosphate
  modified_base 18: mod_base = OTHER; note = 2'-O-methylguanosine-3'-phosphate
  modified_base 19: mod_base = OTHER; note = 2'-O-methyladenosine-3'-phosphate
  modified_base 20: mod_base = OTHER; note = 2'-O-methyladenosine-3'-phosphate
  modified_base 21: mod_base = OTHER; note = 2'-O-methyladenosine-3'-phosphate attached to N-[tris(N-acetylgalactosamine-alkyl)-amidodecanoyl)]-4-hydr oxyprolinol (Hyp-(GalNAc-alkyl)3)
tctgatgcagcttatacgaaa

SEQ ID NO: 538 - RNA, 23 nt, synthetic construct
  misc_feature 1..23: note = Description of Artificial Sequence: Synthetic oligonucleotide
  source 1..23: mol_type = other RNA
  modified_base 1: mod_base = OTHER; note = 2'-O-methyluridine-3'-phosphorothioate
  modified_base 2: mod_base = OTHER; note = 2'-fluorouridine-3'-phosphorothioate
  modified_base 3: mod_base = OTHER; note = 2'-O-methyluridine-3'-phosphate
  modified_base 4: mod_base = OTHER; note = 2'-O-methylcytidine-3'-phosphate
  modified_base 5: mod_base = OTHER; note = 2'-O-methylguanosine-3'-phosphate
  modified_base 6: mod_base = OTHER; note = 2'-O-methyluridine-3'-phosphate
  modified_base 7: mod_base = OTHER; note = Adenosine-glycol nucleic acid (GNA)
  modified_base 8: mod_base = OTHER; note = 2'-O-methyluridine-3'-phosphate
  modified_base 9: mod_base = OTHER; note = 2'-O-methyladenosine-3'-phosphate
  modified_base 10: mod_base = OTHER; note = 2'-O-methyladenosine-3'-phosphate
  modified_base 11: mod_base = OTHER; note = 2'-O-methylguanosine-3'-phosphate
  modified_base 12: mod_base = OTHER; note = 2'-O-methylcytidine-3'-phosphate
  modified_base 13: mod_base = OTHER; note = 2'-O-methyluridine-3'-phosphate
  modified_base 14: mod_base = OTHER; note = 2'-fluoroguanosine-3'-phosphate
  modified_base 15: mod_base = OTHER; note = 2'-O-methylcytidine-3'-phosphate
  modified_base 16: mod_base = OTHER; note = 2'-fluoroadenosine-3'-phosphate
  modified_base 17: mod_base = OTHER; note = 2'-O-methyluridine-3'-phosphate
  modified_base 18: mod_base = OTHER; note = 2'-O-methylcytidine-3'-phosphate
  modified_base 19: mod_base = OTHER; note = 2'-O-methyladenosine-3'-phosphate
  modified_base 20: mod_base = OTHER; note = 2'-O-methylguanosine-3'-phosphate
  modified_base 21: mod_base = OTHER; note = 2'-O-methyladenosine-3'-phosphorothioate
  modified_base 22: mod_base = OTHER; note = 2'-O-methylguanosine-3'-phosphorothioate
  modified_base 23: mod_base = OTHER; note = 2'-O-methyladenosine-3'-phosphate
tttcgtataagctgcatcagaga

SEQ ID NO: 539 - RNA, 21 nt, synthetic construct
  source 1..21: mol_type = other RNA
  modified_base 1: mod_base = OTHER; note = 2'-O-methyluridine-3'-phosphorothioate
  modified_base 2: mod_base = OTHER; note = 2'-O-methyladenosine-3'-phosphorothioate
  modified_base 3: mod_base = OTHER; note = 2'-O-methyladenosine-3'-phosphate
  modified_base 4: mod_base = OTHER; note = 2'-O-methylguanosine-3'-phosphate
  modified_base 5: mod_base = OTHER; note = 2'-O-methyluridine-3'-phosphate
  modified_base 6: mod_base = OTHER; note = 2'-O-methyluridine-3'-phosphate
  modified_base 7: mod_base = OTHER; note = 2'-fluoroguanosine-3'-phosphate
  modified_base 8: mod_base = OTHER; note = 2'-O-methylguanosine-3'-phosphate
  modified_base 9: mod_base = OTHER; note = 2'-fluorouridine-3'-phosphate
  modified_base 10: mod_base = OTHER; note = 2'-fluorouridine-3'-phosphate
  modified_base 11: mod_base = OTHER; note = 2'-fluorocytidine-3'-phosphate
  modified_base 12: mod_base = OTHER; note = 2'-O-methyluridine-3'-phosphate
  modified_base 13: mod_base = OTHER; note = 2'-O-methyladenosine-3'-phosphate
  modified_base 14: mod_base = OTHER; note = 2'-O-methylguanosine-3'-phosphate
  modified_base 15: mod_base = OTHER; note = 2'-O-methylcytidine-3'-phosphate
  modified_base 16: mod_base = OTHER; note = 2'-O-methylguanosine-3'-phosphate
  modified_base 17: mod_base = OTHER; note = 2'-O-methylcytidine-3'-phosphate
  modified_base 18: mod_base = OTHER; note = 2'-O-methyladenosine-3'-phosphate
  modified_base 19: mod_base = OTHER; note = 2'-O-methylguanosine-3'-phosphate
  modified_base 20: mod_base = OTHER; note = 2'-O-methyluridine-3'-phosphate
  modified_base 21: mod_base = OTHER; note = 2'-O-methyluridine-3'-phosphate attached to N-[tris(N-acetylgalactosamine-alkyl)-amidodecanoyl)]-4-hydr oxyprolinol (Hyp-(GalNAc-alkyl)3)
taagttggttctagcgcagtt

SEQ ID NO: 540 - RNA, 21 nt, synthetic construct
  source 1..21: mol_type = other RNA
  modified_base 1: mod_base = OTHER; note = 2'-O-methyladenosine-3'-phosphorothioate
  modified_base 2: mod_base = OTHER; note = 2'-O-methyladenosine-3'-phosphorothioate
  modified_base 3: mod_base = OTHER; note = 2'-O-methylguanosine-3'-phosphate
  modified_base 4: mod_base = OTHER; note = 2'-O-methyluridine-3'-phosphate
  modified_base 5: mod_base = OTHER; note = 2'-O-methyluridine-3'-phosphate
  modified_base 6: mod_base = OTHER; note = 2'-O-methylguanosine-3'-phosphate
  modified_base 7: mod_base = OTHER; note = 2'-fluoroguanosine-3'-phosphate
  modified_base 8: mod_base = OTHER; note = 2'-O-methyluridine-3'-phosphate
  modified_base 9: mod_base = OTHER; note = 2'-fluorouridine-3'-phosphate
  modified_base 10: mod_base = OTHER; note = 2'-fluorocytidine-3'-phosphate
  modified_base 11: mod_base = OTHER; note = 2'-fluorouridine-3'-phosphate
  modified_base 12: mod_base = OTHER; note = 2'-O-methyladenosine-3'-phosphate
  modified_base 13: mod_base = OTHER; note = 2'-O-methylguanosine-3'-phosphate
  modified_base 14: mod_base = OTHER; note = 2'-O-methylcytidine-3'-phosphate
  modified_base 15: mod_base = OTHER; note = 2'-O-methylguanosine-3'-phosphate
  modified_base 16: mod_base = OTHER; note = 2'-O-methylcytidine-3'-phosphate
  modified_base 17: mod_base = OTHER; note = 2'-O-methyladenosine-3'-phosphate
  modified_base 18: mod_base = OTHER; note = 2'-O-methylguanosine-3'-phosphate
  modified_base 19: mod_base = OTHER; note = 2'-O-methyluridine-3'-phosphate
  modified_base 20: mod_base = OTHER; note = 2'-O-methyluridine-3'-phosphate
  modified_base 21: mod_base = OTHER; note = 2'-O-methyluridine-3'-phosphate attached to N-[tris(N-acetylgalactosamine-alkyl)-amidodecanoyl)]-4-hydr oxyprolinol (Hyp-(GalNAc-alkyl)3)
aagttggttctagcgcagttt

1. A double stranded ribonucleic acid (dsRNA) agent for inhibiting expression of high mobility group box-1 (HMGB1), or a salt thereof,
wherein the dsRNA agent or a salt thereof, comprises a sense strand and an antisense strand forming a double stranded region,
(a) wherein the sense strand comprises at least 15 contiguous nucleotides differing by no more than 3 nucleotides from the nucleotide sequence of SEQ ID NO:1 and the antisense strand comprises at least 15 contiguous nucleotides differing by no more than 3 nucleotides from the nucleotide sequence of SEQ ID NO:2; or
(b) wherein the antisense strand comprises at least 15 contiguous nucleotides differing by no more than 3 nucleotides from any one of the antisense nucleotide sequences listed in any one of Table 3, Table 5, Table 6, or Table 7.

2.-14. (canceled)

15. The dsRNA agent, or a salt thereof, of claim 1, wherein all of the nucleotides of the sense strand and all of the nucleotides of the antisense strand comprise a nucleotide modification.

16.-22. (canceled)

23. The dsRNA agent, or a salt thereof, of claim 1, wherein at least one of the nucleotide modifications is selected from the group consisting of a deoxy-nucleotide modification, a 3′-terminal deoxy-thymine (dT) nucleotide modification, a 2′-O-methyl nucleotide modification, a 2′-fluoro nucleotide modification, a 2′-deoxy nucleotide modification, a locked nucleotide modification, an unlocked nucleotide modification, a conformationally restricted nucleotide modification, a constrained ethyl nucleotide modification, an abasic nucleotide modification, a 2′-amino nucleotide modification, a 2′-O-allyl nucleotide modification, 2′-C-alkyl nucleotide modification, 2′-hydroxly nucleotide modification, a 2′-methoxyethyl nucleotide modification, a 2′-O-alkyl nucleotide modification, a morpholino nucleotide modification, a phosphoramidate modification, a non-natural base comprising nucleotide modification, a tetrahydropyran nucleotide modification, a 1,5-anhydrohexitol nucleotide modification, a cyclohexenyl nucleotide modification, a nucleotide comprising a phosphorothioate group modification, a nucleotide comprising a methylphosphonate group modification, a nucleotide comprising a 5′-phosphate modification, a nucleotide comprising a 5′-phosphate mimic modification, a glycol nucleotide (GNA) modification, and a 2-O-(N-methylacetamide) nucleotide modification; and combinations thereof.

24.-27. (canceled)

28. The dsRNA agent, or a salt thereof, of claim 1, wherein each strand is independently no more than 30 nucleotides in length.

29. The dsRNA agent, or a salt thereof, of claim 1, wherein at least one strand comprises a 3′ overhang of at least 1 nucleotide; or at least one strand comprises a 3′ overhang of at least 2 nucleotides.

30. (canceled)

31. The dsRNA agent, or a salt thereof, of claim 1, further comprising a ligand.

32. The dsRNA agent, or a salt thereof, of claim 31, wherein the ligand is conjugated to the 3′ end of the sense strand of the dsRNA agent, or a salt thereof.

33. The dsRNA agent, or a salt thereof, of claim 31, wherein the ligand is an N-acetylgalactosamine (GalNAc) derivative.

34. The dsRNA agent, or a salt thereof, of claim 33, wherein the ligand is

[chemical structure]

35. The dsRNA agent, or a salt thereof, of claim 34, wherein the dsRNA agent is conjugated to the ligand as shown in the following schematic [chemical structure]
and, wherein X is O or S.

36. The dsRNA agent, or a salt thereof, of claim 35, wherein X is O.

37.-39. (canceled)

40. The dsRNA agent, or a salt thereof, of claim 1, wherein the double stranded region is 15-30 nucleotide pairs in length.

41.-45. (canceled)

46. The dsRNA agent, or a salt thereof, of claim 1, wherein each strand is independently 19-30 nucleotides in length.

47. (canceled)

48. (canceled)

49. The dsRNA agent, or a salt thereof, of claim 31, wherein the ligand is one or more GalNAc derivatives attached through a monovalent, bivalent, or trivalent branched linker.

50. The dsRNA agent, or a salt thereof, of claim 1, wherein the agent further comprises at least one phosphorothioate or methylphosphonate internucleotide linkage.

51.-67. (canceled)

68. An isolated cell containing the dsRNA agent, or a salt thereof, of claim 1.

69. A pharmaceutical composition for inhibiting expression of a gene encoding HMGB1 comprising the dsRNA agent, or a salt thereof, of claim 1.

70. (canceled)

71. A method of inhibiting expression of an HMGB1 gene in a cell, the method comprising contacting the cell with the dsRNA agent, or a salt thereof, of claim 1, thereby inhibiting expression of the HMGB 1 gene in the cell.

72.-79. (canceled)

80. A method of treating an HMGB1-associated disorder in a subject, comprising administering to the subject the dsRNA agent, or a salt thereof, of claim 1, thereby treating the HMGB1-associated disorder in the subject.

81. The method of claim 80, wherein the HMGB1-associated disorder is selected from the group consisting of liver inflammation, liver fibrosis, liver damage associated with an elevated level of HMGB1, metabolic disorder, blood pressure equal to or higher than 130/85 mmHg, elevated fasting blood glucose of at least 100 mg/dL, large waist circumference (40 inches or more for men and 35 inches or more for women); waist-to-hip ratio<1.0 (for men) or <0.8 (for women); low HDL cholesterol (under 40 mg/dL for men and under 50 mg/dL for women), triglycerides of at least 150 mg/dL, NAFLD, steatohepatitis, NASH, NASH cirrhosis, cryptogenic cirrhosis, hypertension, hypercholesterolemia, hepatic infection, hepatic inflammation, cirrhosis, autoimmune hepatitis, chronic alcohol consumption, alcoholic hepatitis, alcoholic steatohepatitis, hemochromatosis, and chronic use of pharmaceutical agents that cause liver damage.

82.-89. (canceled)
